United States Patent Application Publication US 2025/0235397 A1 - sequence listing, part 4

SEQ ID NO: 10 - DNA, 8974746 bp, Bacillus subtilis (residues 5,384,851-7,179,800 of 8,974,746)
  source 1..8974746: mol_type = genomic DNA
cctcgctccagtggttcggcatatcgccgtacatggcatcgaggaagaaaggataggagtcgctcgccagcaccgcctcaacgtcgcgcgcacaggttttcgccgtctcaagatcccattgtggcgtgatcccggcatgcgccatgaccagctttttctcttcgtcgacctgcagcagcggctgacggcgcagccagttaatcagatcgtcggcatctggcgcatccagcagcggggtgaggcgatctttaggtttgttgcggctgatcccggcgaacaccgccagcagatgcagatcgtgattgcccagcaccatgcgcacgctgtcgcctagcgatttgacgaaacgtaatacttcaagggagccggggccacgcgcgactaaatcgcccgtcagccagagtgtgtcctgtcctggcgtaaagtcgacctgttttaataatgcgatcagttcatcgtagcaaccgtgaacgtcgccaatcagatatgtagacattagattaatgaatgagtgtggttacggcgagacggaacacaggaatggcaacgcggaaatcattgccatcgacgtcgaccatttcataatggccctgcatggtacccatcggcgtttcaatcaccgcgccgctggtgtactggtactcttcgccaggggcgatatgaggctgttcaccgaccacaccttccccctggacttcgatttcgcggccattgccgttggtgataagccagtagcgcccgcgcagttgcacgggcgtccgccccagattgcgaatggtcacggtgtaagcaaagacaaaacgttcttcatccggtgaggactgtgattcaacataaacgctttgtacatggacacatacgcggggcgaatcaatcatggcttaactctccttcggcggcgcattttcgctgatgtaattagccagcttgcagtactgctctacggagatgttctccgcacgcattgccgggtcgatcccaagctcagctaacacctcaacggtgaaggaattgctgaggctgttacggatcgttttacgacgctggttaaaggcttcagtggtgatgcggctcagtacacgcagatcttttaccgggtacggtttcgttttgtgcggcacaaggcgcacaaccgctgaatccactttcggtggtggtgtgaacgctgacggcggtacttcgagtaccgggatcacgttgcagtaatattgcgccatcacgcttaaacgaccatacgctttactgttcgggcctgcaaccaggcggttaaccacctctttttgcaacatgaagtgcatgtcggcaatggcatcagtatagctaaagaggtggaacatgagcggcgtggagatgttatacggcaggttgccgaatacgcgcagcggctgacccattttttctgacagttcgccgaagttcatggtcatggcgtcctgctgatagatggtcagcttcggcccgaggaacgggtgcgtttgcaggcgtgcggccagatcgcggtccagttcgatgacggtcagttcgtcgaggcgttcgcctaccggctcggtcagcgcggcaagacccgggccgatttcgaccatcgcctggcctttttgcggattaatagccgagacaatgctttcgatcacgaactgatcgtttaggaagttttgcccgaaacgtttacgggctaagtggccctgatggactcgattagtcattgagtattaacaatcattttgatggcgagattaagcgccgtaataaaactgccgacatccgccttcccctggcctgccagatccagcgcagtaccgtggtcaacggacgttcgaataaagggtaaaccgagggtgatattcacgccgcggccaaagccctggtattttagcacgggcaggccctgatcgtggtacatcgcgagcacggcgtcggcattatccaggtatttcggctggaaaagggtatcagcaggcagcggaccgctgagattcatccccttcgcccgcatttcgttgagtaccggaatgatggtgtcgatctcttcggtacccatgtgcccgccttcgccggcgtgcggattcaggccacagaccagcacatgcggctgcgggatcccaaattttgtctgcagatcgtgatgcaaaatcccgatgatctcgcgcaggagttcaggcgtgatcgcatccggaatcgctttgatcggcagatgggtggtcaccagcgcaacgcgcatttcttccgtcgccagcatcatcaccactttcggactgtgcgagcgctcttcaaagaactccgtatgcccggtaaacggtatgcccgcttcgttgatgacgcctttgtggacggggccggtaatcagggcggcaaattcgcccttcaggcaaccgtcgcaggcgcgcgcaagggtttcaacgacataatggccgttttccgtgctgagctggccgggaatgaccggcgtacgaaggggaacagaaagaagggtgagggtaccggcttgctgcggtgcaggctgttgaccttcaacgtaagggatgagcgttaaaggcagaccgagcatcgctgcccggtcttgtaacagtgttgcatcggcgcagacaaccagttctactggccagctgcgctgggcaagctggacaacgaggtcaggtccaatcccggcgggttcgccgggcgtgataacaacacgatgctgtttcattagttgctcagcactttcacgtaagcactggcgcgttgttcctgcatccaggtggctgcttcttcagagaacttacggttaaacagcatgcggtaggctctgtctttctgtgctgcatccgttttatcaacgttacgagtgtccatcagctcgatcagatgccagccaaacgaagagtggaccggcgcgctgatctggcctttgttcagcttcatcaacgcgtcacggaaggcaggatcgtaaatatccgccgctgcccagcccagatcgccaccctggttagcagagccaggatcctgagagaactcttttgctgccttcgcaaacgaggttttaccgctcttaatatctgccgcaatctgttccagcttcgcacgcgcctgatcgtcagtcatgattggtgacggcttcagcagaatgtggcgagcgtgaacttcggtaacggagatattttggctctggccgcgcagatcgttcactttcaggatgtggaagcccacgcctgaacggattggaccgacgatatcgcctttcttagccgtgctcagtgcctgagcaaagagggatggcagctcctgaatacgtccccagcccatctggccgcctttcagcgcctgttggtctgcggagtaggtgatggccagcttgccaaagtcaccgccgttacgcgcctgttcgacaattgaacgtgcctggctttctgcttccgcagcctgatcggacgtagggttctctggcagtgggatcagaatgtggctcaggttcagctctgtgcttgcatcgttctggttacccacctgttttgccagcgcgtccacttcctgaggcaggatagtgacgcggcgacgcacttcgttgttacgcacttccgaaatcagcatctctttacggatctggttacggtaggtagcgtagctgatgccgtcataggccagacggctgcgcatctggtctaaagacatattgttctgctttgcgatgttagcgatcgcctgatcgagctgctcgtcagtgaccttcacacccattttctgccccatctgaagaacgatctgatccatgatcaggcgttccaggatctggtggcgcagcgtggcgtcatccggaagctgctgacccgcttcgcccgaattgagcttcaccgatttcatcagaccgtcaacgtcactttcaagcacgacgccgttgttaaccacagcagcgactttatcaacaacctggggggccgcgaagctggtattcgcaaccatagcgacaccgagcagcagcgttttccagttcttcatactttttccatttcaattaaccgcaaagcggattacgttgcaaatcaagcacattacaaggaactgctgtaaggcagaatgttcgagcgcagcattttctgcgtacccagaccgtagttggaactcaggccgcgtaactcgaagttaaagccaatcacgttatcgtatttgctctgattgttttcccagccgttaagcttacgttcgtaaccgacacgcagcgcgtagcagcaggagttatattgcagccccaacatctggtcagcagctttattggtgttagtgtcaaagtagtaagcgcctacgattgaccaacggtcggcgataggccaactcgctgccgcaccgacctgagaaataccatccgaatattgcggtgatttccagtagttgatgctgttctggtcattgcttttcggtagcgttgcctgaatgtattccgggctagcgtagcgatagcttacctgaatcatgcgatcttcatcacgacgatactctatggcggcactactgttagcaacgttgtcgagacgcgtgtcatactgcacaccgccacgcaggccccaacggtcagtcatacgccagtaggtatctcccgcccaaactattgctcccgttttgttgtctttctcccactgaatattgtcatcgcccgtgcgagactctgtgaagtagtagatttgacccacagaaacgttaaaacgttcaacggctgcatcatcataaacacgtgttgtgacgccggtcgttaactgattcgctgaggcgatacggtccagacctccgtaggtacggtcacggaacagaccactatagtcagactgcagtaaagaggagtcgtagttctgaatgttgctctggtcgcgatatggcacgtacaaatactgcatacgcggttcaagcgtctgggtataaccatccgccagcagggccatatcacgctcgaaaatcagcttgccgtccattttaaactgagggagcgttcggttgaccgactcttcgagatgcgcactgttagtggagttgtaattatcaagatttttttgctgatagtgagtcgccatcagcttggcttcggtattcaggcttgcccagtcgttagaccacggcagattgatcgtcggctcaaggtgaacacgcgtggcttcaggcatgtccgaattcgtgttaacgaaatgcactgcctgagcgtaaatccgggcgtcgaatggacctacgtcattctggtaccagttgacgtccagctgtggctcagcgccataggtaggcgtggactggtcagaaaacacctggaatttcttggtcgagacggttgcatcaaaattctgcaccgcatagcctacgctgaatttctgcgtggcatagccatcagtactcgagccgtatttggaggagaagtcattaaaatatgacgaatcgctgactttggtgtaatcaacattaaagcgccacacctgatccatcaccccggaatgctgccagtagtacagccagcggtgacggttatcaccagaaacgtttctggcatcgtccttgtaaacgttatccgacggcagataatccagctccatcagacccgcacctgcctgagtcagatagcggaactcgttctcccacatgacgttaccgcgcttgtggatatagtgcggcgtgatcgtcgcatccatgttaggcgcgatgttccagtaatacggcaggtagaactcaaagtagttcgtggtgctgtatttggcattcgggatcaggaaaccggagcgacgtttgtcacccaccggaagctgcagataagggctgtagaatatggggaccggacccaccttgaagcgggcgttccagatctcagcgacctgctcttcgcggtcatggataacttcgctcccgaccacgctccaggtatttgaacccggcagacacgacgtgaacgtgccattttccaggatcgtatagcggttttcaccgcgctgtttcatcaggtccgcgtcaccgcgcccctggcgacccaccatctggtaatcacctttccagacgttagtgtctttggtattcaggtttgaccaggctttcggacctttcaggatgacctgattgtcgtcatagtgcacattacccagcgcatccaccgttcgtaccggctcggccgcaccttccggctgcttctggtgcaactgcacttcatctgcctgcaggcggctattgccctggttaatatcgacattgcctgtaaaggtggcattgtcagggtaagtcccttttgaactgtcggcagtaatggttaccggcaagctattggtatcgccactcaccagtgggcgattataacttgggacgccaagcatacactgcgaggcgagatcggccgccagcccctgttgactgtacagggcggtgccaatcattgtggccaggagggtggggatacgttttttcatacgttgtattttattgttccgtcatcagtggctacggcttacaaacgctcagagactatcttactcatctgcgcagtaccagcgttaatcctgcccgtttgcgtgccagagtgttaggctcgctatcgaatgacgagtatgataaagcaaattataggcgatgtccttcaattgaccgtgacttgaacacagtgatgatgacgttgcgtcggccaggaatatgactatccggggagtatatgcagtattggggtaaaataatcggcgttgcgttcgccatcatcatgggtgccgggttctggggaatagtgctggggcttattattggccatatgtttgataaggcgcgcagccgtaaaatggcctggtttgccaaccagcgcgagcgccagtcactctttttctccaccacttttgaggtgatggggcatttaaccaaatccaaagggcgcgtcacggaagccgatattcagattgccagcgtctttatggatcgcatgaatctgcacggtgactcccgcctggaggcgcaaaatgcgtttcgcatcgggaaatccgataactacccgcttcgcgaaaaaatgcgccagttccgcagcatctgcttcggccgttttgatttaattcggatgtttctggaaattcagattcaggcggccttcgccgacggctcgcttcaccctaacgaacgcgatgttttatacgtgattgcggaagagctgggtatctcccgtatgcagttcgatcagttcctgcgcatgatgcagggtggcgcgcagtttggcggcgggtatcaccagcagtcttctggcggtgcctggcagcaggcgcagcgtggtccgacgctggaagatgcctgcaacgtgcttggcgtaaaaccctctgacgatcagaccaccatcaaacgtgcctatcgtaagctcatgagcgagcaccatccagacaagctggttgcaaaaggcttaccgcctgaaatgatggagatggcgaagcaaaaagcgcaggaaattcagaaagcgtacgagctgattaaagagaagaaaggcttcaaataagcccctttttagaatgatgaagggcctgacagcatgagctgccaggccctttatacagcgttaccagctgtagcgcacgttcaggctaccgtttacatcgctgtaatcattatcacctttctgtccggagacctgggcaataacgctccattgcttgctcacatttgcctgaatacccgctttcagctccgcacgatcggcaggaaggtcctgtttgatctgtgtgtcaccaaagttgactgccgtgtcttcagaggtatgcagccagttggcctccgcaaacggctggataaccgcgtcgttcgacttattcatcttgctgtcaatgcgcaggcctaaacgggtggtccagctttcgccgttttgcccatcaatcgtcgtgccgctgctgtctttgatgtcatccgcactgtaatcctgccagacgacctgtgcctgcggcgtgaggctcagcgtgttgtcgccgagtgcgatatcgtagcggtagcctgtttccagcgaaacggcgttggcgtttgaatcgtaatccgttgagccaacgtcaccgttatctacgctgttgtggtacatcccatactgataccaactgtcgacataaaaaccctgatgctgtcgggcatcggcaaaccacgttgcatagactccgaggttatagccatcgactttgccgtcagcgctaaagcggctgccgtcagcacctttattgccagtgctgtcgctgctggcgttgatatagctacccataaccccgaccaccaggctttgttcgccgttgttccaggcggcaacatcgcccccaatctggaactgggagtagttgctgtcgatatcaatattgctctctgctgcagtagactggttcttacctgctttgaaacgcgcccatgtcgtgccgttttccgatttgaactgactgccttctcggtctgacagggtctgcatttgcagatcgcgagccagccactggttgctgaggtatgaaccgatatcggcacgatactgaggcgttacgtcgccattatcactcgtggcctgggaacgaagataccagtcccctgagtcctgatacaggcggtattcgtaggcgttaatctggacctgattaccctgaacaaaggtgccgtttgatgcaccgccgacctgaatcacttcaataccgttttgggtcagtgcgccctgaccaccaacgttgttaatgtacagggtggtgttcccggacgtattccccgtaatgttaagcatatcggttggagacgtgtcgtcgcctaactgcgtatttagcgtcacagaaccctggttgctggtgtaatcgccgtttacgatcagcgtgttgccggtcgtcgcaccattggttccctcaatattgccgctgacaatgctgcctgcgttgctcagatcaccattgatcgttagcgtgtcgttgaactgaacggtacccttgctattaacattgccgttcaccacaccgttggaaccgccaaacgtggcgcctgccgcgacattcacggcctgctcgctgttttgtacgccgataacgccagcctcgtccagccagagcgtgccctggttcacatccgttgtgccgctgtaactgtttgcggcattaaggatcagcgtaccttgcccctctttggtcagcgattttccgtcccatccggtcgtggcttcggcgttttgatcgacaagcgccgtgctcagcgtaaagctgccgtcaggattgttcagagtgaatgtgccgtgagccgctgttgccgctgggttctggctggcataccaggttaatgacggtgtcaggacgtaattggtcacgtcggcgggatccatggtgccgctaaaggtgatgaagtcaacggagccagatgccatgcccgcgacggtgaggttggtaaaattgccattgattgcattttcagcgtcaatcaccgtgaaggcgctatccgcggaaagcgtgctggcactaccgtaacctgtaatatttagtgtgccatcaagcgtcgcattctgagcgacaataggcgcactggtcgcgtttgcgtcaagatagacatcagtttggctgttagccagaagggtgaaattaccgacattgagtgtaccagtactgccgttttcatcgccgagtgtgatgcgtccgctgctggtaagattaccgacgctggaatcggccgtcagcagccattggctgttcgcatccagcgtcatgctgacgttatcaccgctggccttaacggcgccggacagcttgctgttttcagcgcgaagggtgactgcatcagtggtattggccacggtgagcagattgtctgcgttcatcgtttgcacattcttcacgttaatatcggcagatccggaatccaccgcaaaagcacttcctcctgacgcggttgccgtaatgctccctccgtcaatcgtagcgacattttttccaccgctgaacgagaaggcgacattgctaccggaaacgttgctctgggtgacggtcgcgctgctggcgctttctaaggcaatggcagcagattgttcgctggtgatatctgtgctgttcgcctcaagggctccaccgtgagtcatcgccactgcccgcgaattttctccggacgcgatcgttgaaccgttattcagtacgaatgtgctctttgccccgtcagaggatattgcgtcagcatttttcccatgagtgacgatatgagtgtcagtgagttctgcgcgtccggtattcattatgccaactgactgctcaccgtaagtttcaacgtgggatgccgctaaattaaatgtgttggtatagttttgaataccaaagctctggcttccggtagtggtaatcgtgacgtttgagccggtcaattcaccgtcgttatatatacctgcattaccaaaatctcccgtggtgtttatattcacattgtctaatgaaagggtggcatatcggttaacaatagcccgagccatgccatacccggaagtcgtaatggtcgcgttttttatcgtcaggtctgcgccattcaatatctcaacaccataagaaccctctcccgtcgccgtatagctccccccgtcaatggtgccttttgcattagagctaaacaatacggcagatgcgatctcgccttccgtcgaaacggtaaggttgttcaacatggcttctgagttatcaccgacaatggttatcgcatgactgccttccccggaagtgcggattgtggatcccgaatcatcgagcgtgattttcgctccattcgacacggatagccccatgcctgcatccccggttgtggatatcgttaaggcgccgttatcggtgacgatgacatcagagccagaggcagataccgccgaggtattagggctcgtcgttgaatattcaccactgatggtattattacccgggactgcaacaaacgtcgtgtcactggcgtgtgcggtactcacaacacctgacaagataaacgttgcgatcgcgcttccggcgcgtacgcaggatttgactttgctgtccccttttgaaaactccgaggcaacgatgtacatatttctggcgcaattccagacgatgttatacgaacggttcatacacttccttgtgaatcaatgagtaaactaagtgtggctgttgagtagaaaaataactccgtttggatagggtagagttagtatttccttaaaatgagctggattatcagtaataaattgcatcgtgttcaatttaatattttttaatccaaaccttagtctttctaaaaatactgagtgttatttaaggaagagataattatcgtgaatgaacttgggcgggttttcagatgagtaggggagatatatatgctgtgtgaatatttaccgtcgacagtgagctaacagtaaatattcacatcaggaatttaaaaatcgaccggggctttaaacgtcatcgcgttaccgaaggccggatgggtgatggtaagcgtctgcgcgtgcagctgcagacgtggcgctaaggccagcgcttcaggcggcgcgtaaaagcggtcgcccagaatcggatgacccagcgcaagcatatgcacgcgcagctggtgtgaacgtccggtaatcggcttaagcaggacgcgcgcggtattatccggcgcgtactcaagcacttcatactcggtttgcgcggccttgccggtttcataacacaccttctgctttggccgattcggccagtcgcagatcagcggtaaatccaccagcccttccgcctgcgccgggtgaccccagacgcgggcgacatactgcttcttcggctcgcgctcgcggaactggcgcttcagctcgcgttctgccgctttgttcagcgccaccacaatcacgccgctggtcgccatgtccaggcgatggaccgactccgcctgaggataatcgcgctgaatgcgcgtcatcacgctgtctttgtgctcatccagacgacccggcacggacaacagcccgctgggcttgttgaccaccataatgtgttcatcctgatacagaatgaccagccagggatcctgtggcggattgtacggctccatcaccatcttgcgctccgtttactgatgcgtcacaacgataagacgcagggcatccagacgccagcttgcctgatccaggctttccagcacctgctgacggttgctttcaatcgccgccagctcgtcgtcacggatgttcgggttcacggccttcaacgcctccagacgcgacagctctgcagacagtttctcgtcggcttcactgcgcgcggcgtcaatcagcgctctggccgctttctcaatctgggtttcaccctgctggagaatggcatgcacgtcctgctgcaccgcattgaccagcttgctgccggtatggcggttcaccgcgctcagctggcggttgaaactctcaaattcaacctgtcctgcgaggttcgtgccgtttttatccagcagcagacgcaccggcgttggtggcaggaagcggttgagctgcagctgtttcggcgcctgcgcttccacaacgtagatcagctccagcagcagcgtgcctacgggcagcgccttgtttttcaacagcgagatggtgctgctgccggtatcgccagagaggatcagatccagcccgttacggatcagcgggtgttcccaggtgatgaactgggcatcttcgcgggacagcgccacatcacgctcgaaggtgatggtgcagccatcttccggcaggcccgggaaatctggcaccagcatgtgatcggacggggtcaggacaatcaggttctcgccgcggtcgtcctggttaatgccaacgatgtcgaacaggttcatggagaagctgatgaggctggtgtcatcatcctgctcttcaatgctctcagccagcgcctgcgctttttcaccgccgttggagtggatctccagcaggcggtcgcggccttgttcaagctgcgctttcagcgcgtcatgcttctcacgacaggacttaatcagatcgtcaaagccgtcggtgttttccggcgcggccagatagccgatcagatcgccgtgcacctgatcgtaaatggtgcggcccgtcgggcaggtatgttcaaacgcatccagaccttcgtggaaccagcgcaccagcacggactgggccgttttttccagatacggcacgtggatctgaatatcgtgcgcctgaccgatacgatccagacgaccgatacgctgctccagcagatccgggttgaacggcagatcgaacatcaccaggttgctggcgaactggaagttacggccttcagaaccgatttcagaacacagcataacctgagcgccgctgtcctcttcggcaaaccacgccgcagcgcggtcgcgttcaacgatggacatgccttcgtggaacacggcggcgcgaatgccttcgcgctcgcgcaggacctgctccagctgcagcgcggtggccgccttggcgcagatcaccagcaccttctgggagcggtgcgcggtcaggtagcccatcagccactctacgcgcggatcgaagttccaccaggtgccggtatcgccttcaaattcctggtagatttgttccgggtagagcatgtcgcgggcgcgctcttcctgcgttttgcgcgcgcccatgatgccggaaactttaattgccgtctgatactgcgtcggcagcggcagcttaatggtatgcagctcgcgtttcgggaaccctttcacaccgttacgggtgttacggaacaggacgcgactggtgccgtggcgatccatcagcatgtcgatcagctctttacgcgcggattccgcgttgtcgctgtcgctgttagcggcctgcagcagcggctcgatatcctgctcgccaatcagatcgctcagggtgttgagttcatcatcagaaagacgcttgcccgccagcagcagcgcgacggcatctgcaaccggacggtagttattctgttcttccacaaactgcccgaagtcgtggaaacggtttggatcgagcaggcgcagacgggcgaagtggctttccaggcccagctgttccggcgtagcggtcaacagcaggacgccaggcacgcgctcggcaagctgctcgatagccatatattcgcggctcggcgcgtcttcgctccagaccaggtggtgcgcttcgtcgaccaccatcaggtcccactcggcatcgcacaggtgctcaagacgctgcttgctgcggcgcacgaagtccagggagcagatcaccagctgttcggtttcaaacgggttgtccgcatcgtgctgggcttcggcgtagcgttcgtcatcgaacagagagaagcgcaggttaaagcggcgcagcatctcaaccagccactggtgctgtaaggtttctggcaccacaatcagcacgcgctcggcagcgccggaaagcagctgttggtgcaggatcatgcccgcctcgatggttttacccaggcccacttcatctgccagcagcacgcgcggcgcatggcgacggcccacgtcatgggcgatgttcagctggtgggggatcaggctggtgcgctggccgcgcaggccgctccagggcatgcggtactgttcactctggaacttacgcgcgcgatagcgcagggagaagcgatccatacggtcgatttgcccggcaaacaggcggtcctgcggcttgctgaacaccagcttgctgtcgagcagcacttcgcgcaggatgacattggcctcgtcggtgtccaggcgagtgccgatgtaggcgagcagtccattctcttcttttacgtcttcaatcttgagctgccagccgtcgtggctggtcacggtgtcacccggattaaacatcacgcgggttacaggggagtcattgcgggcgtacaggcggttttcaccggtggcagggaagaggagggtaaccatgcgcgcatcaacggcaacgacggttcctaatccaagttcgctttctgtatcgctgatccagcgttgaccaagtgtaaaaggcatagttgttcggctctaatctttaattgcaggcaatagttcgaccaccgtcaaaaaagacggtcatcgaaaaatgggtccgggaatggaaagggcgctatggtactggatggcagccatttcgtcacgcgtcaaaataggccaagttgccctgtcactagtgtagcaaaatcatcgtcgatgaagggcaaaattccgtcggcaaccggctgaagctgacgcgtcaggtagtgttcataatccagaggcgagtgctgataatccaccggttccggaccgtttatcgtccagacgtatttgatggttccccgattctgatactgcggcgcgcggccacggcggacgttttcttcgtccgcgaggcgcgcggcgcgaacgtgcggaggaacgttacgctggtactccgcgagcgggcggcgcaggcgtttgcgatacaccagctgcgcgtcaagttcgcctgccatcaggctggctatcgtctcgcgcacgtagtcctgatacggctcattgcgaaatacccgcagatagagcgtttgctggaactgctgggccagcggcgtccagtcggtacgcactgtctcgagccctttaaagaccatccgctgcgcgtcgccttcctgaatcagcccggcatagcgcttcttgctgccctgatcggtaccgcggatggtgggcattaagaagcgggcaaaatgggtttcaaattccagctccagcgcgctggttaagcgcgctttctgcagatgttcctgccaccagtcgttcacgaaggcaaccagcgctttgccgatttgcgcggcatcgtcttcggaatgcgcgcccttaagccatacaaaggtggagtccgtgtcgccgtagatgacgtcatagccccgggattcaatcagcgctttagtctgacgcatgatctcgtgcccacgcatcgtgatcgacgacgccagccgcgggtcgaagaagcgacaggcgctggtgcccagcaccccgtagaaggcgttcatgatgattttcagcgcctgtgagaggggcttgttgccgtggcgcttggcctcatcgcggccgtgccagatgttgcccacgatgtcgggcaggcagtgtttttcccgcgagaagcgtgcgccgaggaagccttcggtgctgtgtccatcatccggctgggccagcccctcaaccagcccgacgggatcgatcaggaaggtgcgaattatcgacgggtagaggcttttgtagtccaggaccagaacggagtcatacagtcctggtcgggaatccatgacgtagccgccggggctggcctgcggcggcacgtccccgaggttgggggcgacgtatcctgcccggtgcattcggggaaaatagaggtggctaaaggccgccacggagccgccgtgcctgtcgaccgcaaggccgtttaccgtcgcgcgctccagcaggaagggcatgatttcggttttgtggaaaatccgcgtgaccagctcacagtctttcaggttataggtggcgagcgcgggcttgtcttcgttaaagcgccggtcgatctcgtccattctgtcccaggggttgtcgatggatttgccttcgccaagcagctcctgcgccaccgcttcgagggcgaatgacgagaagttccagaaggcggacttgagcgcctcgatgccgtcgataatcaggcggccgttcgcctgtgcgaagaaaacgccgttcttaaaaccgtgttcgcgccactcaagctcgctgttgccgcgcccgagcatcagcgggatgcggtaacgctcggcgtgtttttgcagcacacgcaggtcgaactgcaccacgttccagccgatcagaacgtcgggatcgaagtcggcaaaccactggttgagcttctccagcagctgcggccggctggtaacatactcaagccggaaatccagcgcggaggcatcaccattcggtggcccgagcatatagacaacccgatcgccgcagccttcaagtcctatacagtacagttcgccgtgacgggtggtttcgatatccagggagacccacttcagcggcggacggtagtgcgggttcggcttcagccgcgcgttaacgaggctgccgttgtgcgcggtgccatcgacccagacgggcgcggtaataaaccgctccatcagaaaccgttccggtgggcggatgtcagcttcgtagagcgtcacgcccgcctcgcggagcagtttttcatagcgcatcagctgacgatgggcgcgacagtagaggccgtgaaccggctgacggtggaaatctttcagttcaagcggggtaatgcgccagccgttttcaccgcgcagcagctgtttcactttttcgacgtgcgcttcaggaataaacgccacggactcctgcggcggcagcgtcacctgcagcgggccgttgtccgttgccagccagaattcaacctcggtgccctgaggcgtatcccgccagtgtcgggtcagtaaaaagccttcttgcgcctgcgccacgccgttatcccataaaacaaaaccaggcctgattatagcctggttgaggtgggtttgctggggttttatacagtgcctgtttagccggacggcgctgcacttatccggcctacaagctactgcccgtaatacgctttcgcgccgtgcttgcgcagataatgcttatcgagcaggctctgctgcatgtccggtagctgcggcgccagctggcggcagaagatccccatataggcgatctcttcgagcacaatcgcattatgcaccgcatcttccgcgtttttaccccaggcgaacgggccgtgggagtgcaccagcacgccgggcatctgcgcggcgtcgattccctgtttttcgaaggtttcgacaatgacgttgccggtttcccactcgtactcgccgttgatctccgcatcggtcatcagacgcgtgcagggaatggtgccgtaaaagtagtccgcgtgggtggtgccggtcgccgggatggactggcccgcctgtgcccagatggtggcatggcgtgaatgggtatgcacgataccgccgatggttgggaatgagcggtacagcaggcggtgggttggcgtatcggaggagggctttttgttcccttccaccacttcacccgtttcgatgctgaccaccaccatatcgtccgccgtcatcaccgcgtaatcgacgccggaaggcttgatcacaaacacgcctttatcgcggtcaacggcgctgacgttgccccaggtcagggtgaccagattatgtttcggcagcgccaggttggcttcgagcacctggcgtttgagctcttctaacattgttgtctccagtgccggatggcgcttcgcttatccggcctacagaaccgtaggcccggtaaacgcggtgccaccgggcattcagggcttagcgttttgaaccgtaatagacttcgttccagcgcagcgcgtctttaaaggcgggcaggcgggtatcgttatcaatcacggtcagctcgatatcatgcagctcggcgaactgacgcatgtcgttcagatccagcgcgtggctgaagacggtatggtgcgcgccgccggccaggatccaggcttctgacgcggtcggcagatccggctgtgctttccacagggcgttggcgaccggcagtttcggcagagaatgtggggtttcaaccgcatcgacgcagttcaccagcaggcggaaacgatcgccgaggtcgatcagactggcgttgatggccggaccggtgcgggtgttgaagatcagacgcgctgggtcggctttaccaccgatgccaaggtactgcacgtcgaggatcggtttttcctctaccgcgatagaaggacacacttccagcatgtgcgagccgagcactaggtcattgccgttttcgaagtggtaggtgtagtcctccataaaggaggtgccgccctgcagaccggtcgacatcaccttcatgatgcgaagcagagcggcagttttccagtcgccttcgcccgcaaagccgtagccctgctgcatcaggcgttgtactgccagacccggcagctgtttcagaccgtggagatcttcaaaggtggtggtaaaggcgtggaaaccgccctgttccaggaagcgcttcatgcccagctcaatgcgcgccgcgtccagcacgttctggcgcttgtcgccgttgatttgtgccgcaggcgtcaggcggtagctgctttcgtactcgtccaccagcgcgctcacgtcgccatcgctgatgtcattcaccacctgcaccagatcgcccacggcccaggtattcacggagaagccgaacttgatctgcgcggcgactttatcgccgtcggtgaccgccacttcacgcatgttgtcgccgaaacgcaccactttcaggtggcgggtatcctgcttagagaccgcctgacgcatccaggcgccgatacgctgttgcgccttgccatcctgccagtggccggtgaccaccgcgtgctgctgacgcatacgcgcgccgatgaagccgaactcgcggccgccgtgtgcggtctggttcaggttcataaagtccatgtcgatgctgtcccacggcagggaggcgttgaactgggtatggaactgcagcagcggtttgttgaggatagacaggccgttgatccacatttttgccggtgagaaggtgtgcagccacaccaccagaccggcgcatttatcgtcgtagttggcgtcgcggcagatgtgggtgatttcgtccggcgtcgtgcccagcggtttcagcaccagcctgcacggcagtttggcttccgcgttcagcgcgttaacgacgtgctccgcgtgtttcgttacctgctgcagcgcttccggtccgtaaagatgctggctgccaatcacaaaccacacttcatagttattaaaaatggtcatcatcgtgtccttaatgggtcagggttgccgtagtgtccgcggtgcttttggccggggcggcgacagggagatagtgaagttcggcgctttttgcccattgctggtagcgctgataaagctgttcaaagcattgagcctgcttggcacgcggctgaagggtgttttcgacggcactcgccatatgctgctgcgcggtggggatatccgcatggacgccagcggctacggcggcgaaaattgccgcccccagcgcgcagcactgatcggaggccacaatctggagcggacggttcagcacgtcgcagcaggcctgcatgatcaccgggtttttacgggcgatgccgcccagcgccatcacgttgttcacgtcgatgccctgctcggtgaagcactccataatggcgcgcgcgccgaaggcggtggcggcaatcagaccgccgaacagcgcaggcgcgtcggtcgccaggttgaggtcggtaatcacccctttcaggcgctggttggcaaacggcgtgcggcggccgttaaaccagtccagcaccaccgggaggtggtcgagagacggatttttagcccaggcgtcggtaagctgcggcaggagctgctttttgctctcggcgatctgggttttcagttcaggatgtgccgccgccagccgatccagcggccagccgagcacgcggccaaaccaggcgtagatatcgccaaacgcggactgaccggcttcgaggccgataaagtctggcaccacgctgccgtcaacctggccgcagatgccttttaccgcgcggtcgccgacggtggatttatctgccgtcaggatgtcgcaggtggaggtgccgatcactttgaccagcgtgtttggctgtgcgcccgcgcccacggcgcccatatggcagtcaaacgcgccgccggagatagctacgttctgcggcaggccgagacgcgtcgcccactcttcgcagagggtgccgacgggaatatcggcggtgaaggtgtcggtaaacagcgggtatgacaggctcttgttgatgatcgggtcgagctcatcaaagaacgcggccggaggcaggccgccccagctttcatgccacagggatttatgcccggcgctgcagcggccgcggcggatatcctgcgggcgcgtggtgccggagagcagggcgggcacccagtcgcatagctcaatccatgacgccgctgcctgtgcgacagacgcgtccgcgcgggtgacgtgcaggatcttggcccagaaccactcgctggagtaaatcccgccgatataacgtgagtagtccgttttgcccggctgatggcataagcgggtgatggcttcggcctcttccacggcggtatggtctttccacagcacgaacatggcgttcgggttgtcggcaaactccgggcgcagcgccagtacgcggccttcggcatcgacaggggcaggcgtagagccggtgctgtcgacgccaatccccacaacatcggcccgctgggcgtcggtcaggtctgtcagaacggttttgatcgccgcttccatcgactcgatgtagtcccgcgggtggtgacggaactggttgtttggcgcatcgcagtagcgcccctcttgccagcgcggataccactcaacgctggttgctatctcctggccggacgtacagtccactgccagcgcgcgaactgaatcgctgccaaaatcgaggccaatcgcaattgccatggtgttgctccatcgaaaaaacaggtatggaagaacattagagactggggacaaaagtcgtcaggcaggatccgctaatcttatggactaaattgctgttacaacggaaagtgtgacgctgtgcaaatattcaatgtggacatttctgccgcacttatagacacttttgttactggttatctgcctgctctggcggagaaatcagggggaaaggctgaaacatggcggacgtaaaagcggcgtgatgctttttggatcttttcgcgggccatttttaacctgcatttagtgatatggacaattggtttccttcaggacccttgggagaactgaatctatggccgaaacgcagaacgatcccctgctgccgggatactcgtttaacgcgcaccttgtggcggggctgacccctatcgaggctgagggatatctcgacttttacgtcgaccgaccgctcgggatgaaagggtatatcctcaacctgaccgtgcggggggaagggatcatcaagaacggtgaccagcagttcgtctgccgcccgggggatatcctgctgttcccgccgggtgagatccaccactatggccgtcatccggatgccaaagagtggtatcaccagtgggtctacttccgtccgcgcgcctactggcaggagtggctttcctggccggctatttttgctcacaccgggttttatcgcccggatgaggtgcatctggcgcagtttcgcgagctttttgcccagataatcgaggcggggcaggctggtggacgctatgccgaactgctggcgataaacctccttgaacagctgctgctgcggcggatggaggcgattaacgcgtcgcttaacccgccgctggataaccgcgtgcgcgacgcctgccagtacatcagcgaccacctggccgatagccagtttgatattgccagcgtcgcccagcacgtctgcctgtcgccgtcgcggctgtcgcacctgttccgccagcagcttggcgtcagcgtactgagctggcgcgaggatcagcgcatcagccaggcgaagctgctgctcagcaccacccggatgcccatcgccaccgtggggcgcaacgtgggctttgaggatcagctctatttctcccgcgtatttaaaaaatgcaccggtgccagccccagtgaatttcgcgcgggatgtgaataaacggtaaaaaaagataagcaaacaggtgaatgcggaaagcaacctgtaaactattcagacaattgttgccttgacgcggtgcggggcgctaagcagaatcgctgattcgttttctgaccggaatagttatgcaggcattgctggaacactttattacccagtccgttatgtactcgctcatcgccgtggcgctggtggcgtttctggaatcgctggcccttgtcgggttaatcctgcccggcaccgtgatgatggcggggcttggggcgcttatcggcagcggtgaggtcaatttctggcaggcatggctggccgggataatcggctgtctgctgggcgactggatctccttctggctgggctggcgctttaagaagccgctgcaccgctggtcgttcatgaaaaagaacaaagcgttgctcgataaaaccgagcatgcgctgcaccagcacagcatgtttaccatcctcgtgggccgctttgttgggccaacgcgtccgctggtgccgatggtggccgggatgctggatctccccgtcgcgaaatttgtggtgccgaacattatcggctgcgtcttctggccgccgttctatttcctgccggggatcctggcgggcgcggccatcgatattcctgacggtatgcaaagcggtgagttcaagtggttgctgctgggcacggcggtcctgctgtggctggcggtctggctctgctggcgcctgtggcgcagcgcgaaagcgagcgtcgatcgcctgacgcgctatcttccgcgctctcgtcttttgtggctggccccgctgacgctgggtgtggccgtggtggcgcttgtggcgctgattcgccacccgctgatgccggtgtacggtgagatcctgttgaaagttgtgagccgttaagcgccgggcggcactgcgtttgcccggcctacggttttatacccaataatccagaagcgctttcttttccgctcattaatgcttctgttgctccatcccacaaaatgcgtccctccgcgatcaccaccgatcgcggcgcaatccgtgcggcatcttcgatactgtgcgaaaccatcagcatcgtaagctgctggcgctggcagacctcctgcaccagggcgagcatctcctggcgcagcgcgggatcgagcgccgagaacggctcatccagcagcagcagcggctgctcgcgcaccagacaacgcgccagcgccacgcgctgacgctggccgccggagagctcgcccggcagcctgtcgataaattcagcgatccccatctgtgcggcaatcacttcaagtttttcgcgttgggcgtcgttcagcctgagccccggatgcattcccagcgcgatgttttgccgcaccgtcagatgggtaaacaggttgttttcctgaaacagcatcgacacagggcgtttagccggaggggcgttggtgaaatcacgattatcgatggctatcgacccgctggcaggttgcagaaaaccggcgatcaaattgagcaaggtgcttttcccggcaccgcttgggccaagcaccgcaatccgctcgccctgctgaacggagagcgtgaagcgcatcggcagatgctgatagagccaggttacatcagtcagttttaacatcacgccccgggagtttttcgataacggtaaataaggcaaagcacagcagcagcagtaacagcgcggtaaccgcgccgtcctgactgcggtaagagccgatttgctgataaagccagtacggcagcgtgcggaaatcgtcattaccgaacagcgccacgaccccaaagtctccaatggagagcacgcaggcaaacgccagcgcctgtgccagcggacgctttagcgcgcgcagttcaaccaccttcagccgctgccagccctgcatgcccagcgactggcacagcaaaccgtagcggctgttgacgtcgcgcatcgggttttccagcaccttaagcgcgtaggggatggccattaaggcgttggtaaagatcacaatgccgtcggccctttccggcaggccgagggtgctgttgaacagtaaaaagaagcccgttgccagcacgatacccggcatcgccagtatcagcatgcccgtcagttccagcatttgtccggctttttgcgcctggcgggcgtatagctcacggctgctccacagcagcatcatggtcagcataacgcacagcagtccggcagccagcgctatgcgtaccgaggtccaggtcgcctgccagagaacgggctgttgcaggacggacataagattgaggttcaggccgtcaacgataacggccagcagcggcggcagcaacagcagcagcgccagcgcgatcaggataacatcgctgatgcggctgtgcaggctgtcctgcggatcgcgccagccggttatttgatgactacctgcgggaatggctttactcagccgctggctcaacagcaccagcaccagacagcacgccatctggactatcgccagcagcgcggcgcgaccgggatcgtagtcgtaactcagcgcctggtaaatcgccagctcaatggtggtggcctgcggcccgccgccaagtgacagcacggtggcaaagctggcaaagcagagcataaagattaatgccgccacgggcgggagctggcagcgcagccacggccattcgacaaaacggaagaacgaccagccgcgcatgccgagctgggcggcaatctgccgctgctcgccgggaatgttctccagcgcctgcaaaaagaggcgcgttgccatcggcatattgaaaaacacgtgcgccagcagaatgccctgcagtccgtaaggcgagaatgaccactcaataccaagctggccgaacagcgaagccagccagccctggcgaccgtaaacgctcagaataccaaataccgctaccagcacgggcaggatcagcgtcatggcgcacaggcgcagcagggcctgcctgccggggaaacgccgccgatagagcgcgcgtgcaagaaaaatagccgggatcgccgacagcagggcagaaagagccgcctgccagaaggagaaccggataacgtgccagaggtagctgtcgtgccagagggcgagcaggtcgctctccggtgcgttacaccacagcgcaagaaaggctcccagactgaccgccaccatcacgacggcggcgagcaatccggggagtaaccagccgggaattaacggctgacggcgcgttgccattcacttacccatgcggcacgctgcgcggcgacctgctgcggcgtaaactccagcgaggttttcggcttggtcaactgctcaaaacctgtgggcagcgcaacgctggtgaccggatacatccagttgcccgctggaatggcgttctggaatgccggtgaaaccataaacttcaggaacttctcggccagttccggctgtttgctggcggcggtacgcgcggccacttccacctgcagatagtgcccttccgcaaaatcagccgcagcatagttgtctttcttctcggcgataatgtggtaggccggggaggtggtgtagctcagcaccagatcgctttcgcctttcaggaacaggccataggcttcgctccagcctttggtcacggtgacggttttggcggccagcttctgccacgcttccggcgccttatcgccgtagactttctgcatccacagcagcaggcccaggcccggcgtgctggtccgtggatcttcataaatcacgcgccacttctggtcgctttccaccagctctttcaggctcttcggcgggtttttcagcttgtttttatcgtagacgaaagcaaagtagccgtagtcgaacggcacaaaggtgtcgttcttccagccgcccggcacgttaacggcctctgccgcgacgccgcttttggcaaagagtttggtttgcgaggcggcttccagcaggttgttatccagcccgagcaccacgtcggctttgctatttttcccttccatgcgcaggcggttgagcagcgaaacgccatcttccagcgccacgaacttcagctcgcagttgcagtcggcttcaaaggcttttttgacgaccgggccagggccccagtcggcggagaacgagtcgtaggtgtagaccgtcagaacgggcttggctaaagcgggcagcgcgaacagcgccagcagggggagaactttttttaacactttgcacctcagggttgagtggcaaaggattttgagcgacagcctcaaatcccttcgccggcgttatccggatcaggttcgacgggtattatctcagcgcacatctgtgatgcagcaccccgttgagaacggcgctattgtaatgatttggtgaatattacgaaagcgttatggctccgggggcgcaaaccaggcggatttaaaatcaaaccagcccagggtgttcatccgcaggccgcgcatgctgcgctggccctggatcatcagccagtggtggatcagcgggacgatcgcctgctcggccagcagctgctggcaccacacggaaagattcatctcgcccgcacgccacagagcggcatcctgctgccagtcccggtcgatgcagtgctggatcagcgggacttcatacaaatgcgagaagagggaaaaatcgagcggcagggtgaagttggcgctgttcagccagatatcgctggcgatttccccctggtgccattcgtcatagtccacttccctgatgtccagcctgaccccctccgctgccagcagtcgggtcatgatcctcgcgataaaacgatgctcaacatgatcgcggtagtaggtcagggtgatggactccagccctgcgggcttgtcgcagcgcgttggtcgggcatggtgccagcgcggaagcaggccgtacgccgggaaccagtatgtctggtactgctcttccgcatggtagataagattggaaggagacagcacgtggctgatccacttgcggacagccgggtttgccccacggtgggtgcggcggtcaaagaggagatagtagcagccctcctccaggcggctctccacggccttttctccggtggtggggccttcaagcgtcagcccgcagctcaggtcttcattgagatccggcaatacccacacgttcacttcgtcgatcagcgcccgatagccaaagtagtcatcgaacgcgcggattttcagctggttgctgttattgcgggagacggagtagggcccggtgccaatcggcaggctggcaaaattgttcaatgattcccactcggcaggcaaaatcatcgacggcacatagcccagcagccagggaagccacttgtcctgctgcgccagctcgatatccagcgtccaggacgtgggggagtggatgcgcgaaatatgcgagtagagcggcagcctgcgggcgcgttccagagaggcgatgacgtcgtgcatctccagttcgcgaccgtggtgaaagtggatgcccgggcgtaagaagaagcgccagtggcgcggggaaagctgttgcctgtggtgcgcgatatccgcctccagttccccgttttcctcatttatccgcgtcaggccgctgaagatttgtcgggccatgtgggtttcagaacgccgtaacgccgtgccgggcaacagatttttcatcggacggtagtagagcacccgcagaatgtgtcggccctgacgaaaactacgtccgagatgggagaccagcatctggcgcacggcggccttgtcgcccaccagctggaccagctgatcgatacggtcctgctcgagcaggtcttctgcacgctgctgctgcaatgccagcccggtgtagagaaaggtcagccgcgagcgtttcccgcgtcccgcctccgcttcccagcttaaccacccctgctgctgcatggtattgagcagcgtgcgcatatggcggcgggaacagctaagcaggtcagccagctcgttgagcgtggtttcctgcgattgcccctcgcagcactgccagaggcggataaattgttgctgcagacgaccggaaggcataaaagaggaactcctgacaaaaaaccagcaatttattaatccctatattaggccaataatgcatcccgatgaagcgaggaggtaaatgatgaagaggtctaccgcacgtcagttttatcagcagtacttttcagcgacaaaaggatcgtcctggctggcccgcccgtgtgcagagcaacggctgaaaatgttagaagaactgatgcagtgggacgttacgaaaccggcctcttctcgctgactcgcctcgatcatgtgtgactgagtattggtgctaatcacccgccagcaaaatgtttttgctggcttttttcgtttattctttcacccaatttcgattcgctttcacaaggacttgcgcatgctgtggttgatgacgatggggcgacgcctgaacggcgtgtatgccgcttttatgctggtggcctttatgatgggcgtggcgggagcgctgcaggcgccgacgctgagcctgtttctcagccgcgaggtgggggcacagccgttctgggtggggctgttttataccgtcaacgcgattgccgggatcctggtcagcctcgcgctggcgaaacgatcggacagccagggcgatcgccgcaggctgatcctcttttgctgcgccatggccgtgggcaacgcgctgctctttgcctttaaccgccattacctgacgctcattacctgcggcgtgctgctggcctctcttgcgaacaccgccatgccgcagctgttcgcgctggcccgtgaatacgcggataactcggcgcgggaagtggtgatgttcagctcggtgatgcgtgcccagctctcgctggcgtgggtcattggcccgccgctggccttcatgctggcgctgaactacggctttaccgctatgttttccatcgcggccgggatttttgtcatcagcctggcgctgatagcctttgcgctgccgtccgtggcgcgcgtcgaacagacagcggataaaccgctcacccaggtgagcggctggcaggacaaaaacgtccgcatgctgtttattgcctcgacgctgatgtggacctgcaacaccatgtacatcatcgacatgccgctgtggatcagcagcgatctgggcttaccggacaagctcgcggggatcttaatgggcaccgctgccggtctggaaattccggcgatgattctggcgggctattacgttaagcgctttgggaagcgtcggatgatgatcgtcgccgtggcggccggggtgctgttttacgcgggactgatccttttccattcgcgtgaagcgctgcttgcgctgcagctgtttaatgctgtgtttattggcatcgttgccgggatcggcatgctctggttccaggatcttatgcccggacgcgcaggctctgcgaccacgctttttaccaacagcatttcgaccggagtgatcctggcgggggtgattcagggggcgctggcgcaaagttacgggcatggctcagtttactgggtgattgccgcgatttcggtggttacgcttgggctgacttgccgggttaaggatgtctgattctggaaggtggctttacgaaacaaatcaatggcccgctttttgcgggccattgtctttagcccataaacgcaggctgttttttctcgtacgcggagatggcgtcttcgtgctggagcgtcaaaccaatgctgtccagaccgttcagcatgcagtggcggcggaacgcatcaatgctgaagctgtaggttttatccccggctttcaccacttccccttccagatccacttcaaacgacatgcccggatttgccttaaccagcgcgaacaattcatcgacctgttcgtcgctcagcgtcaccggcagcagctggttgttgaagctgttgccataaaagatatccgcgaagctgggggcaatgactaccttaaagccgtagtctgtcaacgcccagggggcgtgttcacgcgacgagccgcagccaaagttttcccgcgccagcaggatggatgcgcctttgtactccgggaagttcagaacgaaatccggattaggcacctcgcctttatcgtccaggaaacgccagtcgttgaacaggtgcgcgccaaagccggtgcgggtcaccttctgcaaaaactgcttaggaatgatcgcgtccgtatcaacgttagcggcgtccagcgggacaacacggcccgtatgttgggtaaatttctctgccatgattgtctccttatttcaggctgcgaatgtcggcgaaatggccggtgactgccgcagcggcggccattgccgggctgaccagatgggtgcgcccaccgcggccctgacggccttcaaagttacggttgctggtggaggcacagcgctcacccggattcaggcgatcgttgttcatggccaggcacatggagcagccaggcaggcgccactcgaagcctgcttcgataaagatcttatccagaccttcggcttccgcctgggctttcaccggaccggagcctggaaccaccagcgcctgcacgcccggtgcgactttacggcctttggcaatctctgccgccgcacgcaaatcttcgatacgggagttggtgcaggagccgataaagaccttatcaatggtcacgtcggtcaacggtacgccgggtttcagccccatataggccagcgctttttccgcactggcgcgctcgaccggatcggcgaaggaggccggatcgggaatggcgtcgttgacggaaattacctggcccgggttggttccccaggtcacctgaggggcaatctcttctgcctgcagcgtgacaacggtatcaaacgttgccccgtcgtcggttttcagggttttccagtacgctaccgcgtcgtcaaaatcctggcccttcggcgcgtgcagacggcccttcacatagttgaaggtcgtttcatctggcgcgaccagaccggctttggtacccatctcaatggccatattgcacagggtcatgcgaccctccatgctcagcgcctgaatcgcgtcgccgcagaattcaacgacgtggccggtaccgcctgcgctgccggttttaccgatgatcgccagcacgatgtctttcgcggtaatgccaggtgccgctttgcccttcacttcaatcttcatcgttttggcgcggccctgcttcagggtctgcgtcgccagcacgtgttcaacttcagacgtgccaatgccgaacgccagggcgccaaacgcgccgtgggttgcggtatgggagtcgccgcagacgatggtcatgcccggcagggtaattccctgctctggacccatcacgtgaacgatgccctgataggggtggttcagatcgtacagctcaacgccaaattcgttgcagttcttgatcagctcctgcatctggatacgcgccatctcacccgaggcattaatgtctttggtctgggtggaaacgttgtgatccatcgtcgcgaaggttttacccggctgacgtaccgggcgcttgtgcgcgcgcaggccgtcaaatgcctgaggagaggtcacttcgtgtaccagatgacggtcaatgtacagcagtggggtttcgtttggtgcctcgtagacaacgtgcgcatcaaacaatttttcgtataacgttttggccatgattacaccccttcagcgacatagcgggcaataatgtcgcccatttcatcggtactgactgccgccgcgccgcgtgataaatcaccggtacgaacgccttcttctaacgcccggttaatggcattttcaattgcggttgctgcatcgcctgcatccaggctgtagcgcagcagcagggccagagagaggatttgcgcaatcgggttagcgatgtttttgcccgcaatatccggcgcggaaccgcctgccggctcgtacaggccaaaaccttcttcattcaggctggcggatggcagcatgcctatagagccggtgatcatcgcgcactcgtctgacaaaatgtcgccgaacaggttggagcacagcagcacgtcaaactgggacggatctttaatcagctgcatggtcgcgttgtcgatgtacatgtgcgacagctcaacgtccgggtactgcttcgcgacttcgctgacgatctcgcgccacaagatggaagactgcagcacgttcgctttatcaatggaggtcactttatggcggcgcttgcgcgctgactcaaaggcgatatgggcgatacgttcaatttcgaagcggtgatagacctcagtatcgaacgccttctcatgctggccgctgccttcgcgcccttttggctgaccgaaatagatcccgccggtcagttcacgcacgcacagaatgtcgaagccgttggcggcgatatccgcgcgcagcgggcagaactcttccaggccctggtacagcttcgccggacgcaggttgctgaacagcttgaaatgtttacgcagcggcagcagcgcgccgcgctctggctgctctgcaggcggcaggtgttcccacttcgggccaccgacggaaccaaacagcacggcatcggcattttcacagccttctacggtcgctttcggcagtggcgtaccgtggttatcaatcgcaataccgcccacatcgtagtggctggtggtgattttcatcgcaaaacgcgcgcgaacggcttccagtactttcagcgcctgtgccatcacttccgggccaataccgtcgcccggtaacacagcaatatggtaattcttcgacattacacggtttccttgttgttctctttattctgagctttgcgttgcaactctttttcgacttcggcggcgcgccagatgttgttcagcacatgcaccatcgctttcgcggaggattcaacgatatcggtcgccaggcccacgccatggaaacggcggccattgtgggtcacaacaatgtcgacctggcccagcgcatctttgccgtggcccttggccgtcaggtcatatttcaccagctcaacgtcgtactcggtgacgcggttgatcgcctgataaatggcatccacagggccgtttccgttcgccgcttcggccttaatttcatcaccgcaggccagcttgacagaggcagtggcgatgtcgctggagccggactgcacgttgaagtaatccagacggaagtgctctggctcttcctgctgcttgttaataaaggccagcgcttccaggtcgtagtcgaacacctgaccttttttatcggccagcttcaggaaagcgtcgtacagctgatccatgttgtaatcgctgtccttataacccatctcttccatgcggtgcttcaccgccgcacggccggaacgggaggtcaggttcaactggacctgattcaggccaatggattccggggtcataatttcgtagttttcacggttcttcagcacgccatcctggtgaataccggaggagtgcgcgaaggcacccgtgccgacgatcgctttgttggccggaatcggcatgttgcaaatctggctgacggtctggctggtgcgccagatctcgttgtgattgatgcgggtgtgcacgtccatgatgtctttgcgcactttgatcgccatgatcacttcttccagcgagcagttgcccgcgcgttcaccgataccgttcatcgcgccttctacctgacgcgcgccggcgtggacggctgcgatggcattgcccacggccagacccaaatcatcgtgggtgtggacggagataatcgctttatcaatgttcggtacgcggtcatacaggccggtgatgatattggcgaactcaaacggcatggtgtagccgacagtgtccggaatgttgatggttttggcgccggcattgatggcggcttccaccacacgggccagatcttcaatcggcgtgcggcccgcatcttcacaggagaattcaacgtcatcggtgtagttgcgtgcgcgtttcaccatatataccgcgcgctcaatcacctcatccagcgtactgcgcagcttggtggcgatgtgcataggtgaggtggcaataaaggtgtggatacggaacgcttcggccactttcagcgactcagccgcgacgtcgatatctttttcaacacagcgtgccagaccgcacacgcggctgtttttaatggtgcgggcgatagtctggacggattcgaaatcacccggagacgagaccgggaaacccacctccatcacgtcgacacccatacgttcgagagccagcgcgatctgcagtttctcttttacactcaggcttgcctgtaatgcctgttcaccgtcacgtaaagtagtatcgaaaataatgacttgctggctcatgggttaggtccttgtcagtcttagggcgccttgctacgagcataaaaaaacccgcgcagtggcgcgggtttttagtcttactggtgacgattcaacgctgaatttcgcccgccagtctaccgcgcacagtggatgcgtttagtagtagtagaccggtgaaacgaatggtgcgaatcatgaatcgtgctccgttaaattcaatatgcttttagtggtactggatacgccagttgatgtcaacccctgatgataaaaacgggcccgacgggcgtaatcagcaggataattactttagctaattgtgctggttttggcttttacgacccgactaattgtctaattttggactgaagaaaacagttgcagaaacaaataaatataattgtttcaaatgagtgacgcgcgttactgagaatgttctgtacgtaaagggttttaatatcattaagttataattatggtgaatctattgcgcttcgctgaaaaacgaaaagagataacatgttattaactaactgcagagcggtggcgataacagtttaataatacttaagtcatcattaacctggcggtcattgtgtatttgtttggtttatggtttcatttcaatcctaaagtcaaacatatcatttgcgctattttcttttcgtttatatagcgtctttatatattctgaattttaaataattctctttcgctgatcgtatttgcatgataaatcatatttttcgagatgattagcgtacgttggcaaagggagtttagcgtgacagtggagtcagaagtgccagaaaataatattaaacaacctcaagctactgatgggattaaaccgcagttacgcacggtggatcttaatcttctgacggtgtttgatgcggtcatgcaggaacagaatatcacccgcgccgcccaggcgttggggatgtcgcaacctgctgtgagtaatgccgttgccaggcttaagctcatgtttaacgacgaattattcgttcgttacgggaggggggtccagcctacggcacgcgcattccagctgttcggttccatccgccaggcgttgcagttggtgcaaaatgagctgccgggatcgggctttgaacccttgagcagcgagcgcgtattccatctttgtgtctgcagtccattagataattatttaacgtcgattatttataataaagttgaagaaatcgcaccaaatatcaatctggtttttaaatcatccctgaatcaaaacacggaacatcagttacgctatcaggagatcgaattcgtgctggggtatgaagagttccgtcgtccggaattttcctgcgtaccgctctttaaagatgaaatggttctcgtcgccagtaaaaaacacccacgtctgaactctccgctgcgagaacacgatgtttataacgaacagcacgccgttgttgctctcgacagatatgcttcctttagcctgccgtggtatgacactgcggataaacaggcttgcgtggcttatcagggcatggctatggtcagcgtattaaatgtggtctcccagacacagctggtggcgattgcaccgcgctggctggcagaagagttttctgacccattaaatctgcaaattttgccactgccgctcaagttaaatagccgaacctgttatctctcctggcatgaagcggccggacgggataaaggacaccagtggatggaagagttgctggttggtatctgtcgccggtaaacgcatcgggataaatcgcatcggatcatgtgatttatcctgagtttttttggatagttgctattttgttctgtgagtctttttttcgggcggctcttcggcacgcaaaaatagatgatttcctgcattgtcctgcttttcagcgatgatttatcacaccgtcctctattctcagaggaattaaccatatcttctgttaacggctgcgttttctgctttacgcaccgtttatctccccgggtttgctaattgcctgcctcataacgagcggttaaggtaaagaacactctgcaaaatataagattggttcatcccaatcgtaagacggtgcggaaatgaattcggcagtccgtctataacaaaatgcctggaggcaaagcatggagatgttgtctggcgcggaaatggtcgtccggtcgctgatcgatcagggcgtaaagcaagtgttcggctaccctggcggcgcggtcctcgatatttatgatgccctccatacggtagggggcattgaccatgttctgatacgtcacgagcaggcggcggtgcacatggccgacggcctggcgcgtgcgacgggtgaagtgggcgtggtgttagtcacgtccggccccggtgcgacaaacgccattaccggcattgcgacggcgtatatggactctatcccgctggtgatcctctccgggcaggtagccacctcgctgattggctacgatgcttttcaggagtgcgacatggtcgggatttcgcgtcccgtggtgaagcacagcttcctggttaagcaaaccgaagatattcccggcgtactgaaaaaagccttctggctggcggcaagcggacgcccgggaccggtagtggtcgatctgcctaaagacattctgaacccggcaaacaagctgccttacgtatggccggaatcggtgagcatgcgttcttacaacccgacaacgcaggggcataaaggtcagatcaagcgggcgttgcaaacgcttctggcagccaaaaaaccggtcgtctatgtcgggggcggagcgatcaatgcagcctgtgaagcccagcttcgtgaactgattgaaaaactcaaccttcctgttgcgtcgtcgctgatggggctgggggcgtttcccgccacccaccgccaggcgctgggtatgctgggtatgcacggtacctatgaagccaacatgacgatgcatcactccgatgtgatctttgccgtcggtgtgcgttttgacgatcgtaccaccaacaacctggcgaaatattgcccgaatgccaccgtgctgcatattgatatcgatccgacgtcaatttctaaaacggtgtcggctgatgtgccgatcgtcggtgatgcccgtcaggttctggaacagatgctggagctgctggcccaggagaaagcgacccagccgctggatgagatccgcgactggtggcagcagattgaacagtggcgcgcgcgtcagtgcctgaaatatgacacgcagagcgaaaacattaagccgcaggcggtcatcgaagcggtgtggcgactgacgaaaggtgaagcgtatgtgacctcagacgtgggccagcatcagatgtttgctgccctgtattatccgtttgataaaccgcgacactggatcaactcgggtggcttaggcaccatgggctttggtctgcctgccgcgctgggcgtgaagctggcgctgccggatgaaaccgtcgtctgcgtgaccggagacggtagtatccagatgaacattcaggaactgtctaccgcgctgcagtatgaactgccggttctcgtgctgaacctgaataacggctacctcggcatggtgaagcagtggcaggatatgatttattctggccgtcactcacagtcatacatgaaatcgctgccggattttgttcgtcttgctgaagcttacggccatgttggcatgcgggtaaccgatccggccgagctggaaacgaagctcgcacaagcgcttgagcacgttaaaaacaaccgcctcgtctttatggatgtgattgttgatggaaccgagcacgtctatccgatgcatattcggggtggtggtatggatgaaatgtggttaagcaaaacggagagaacctgatatgcgccggatattatcagttttacttgaaaacgagtctggcgcactgtcgcgcgtcattggcctttttgcgcagcgcggttataacattgaaagcctgaccgtcgccccgacggaagacccaacgctgtcgcgcatgacgatccaaaccgtcggcgacgctaaggtgcttgaacagattgagaaacagctgcataagctggtcgacgtgctgcgcgtgagcgagctggggcaaggggcctacgttgaacgcgaggtcatgctggtgaaaattcaggccagcggctacgggcgtgaagaagtcaaacgcaatgcggatattttccgcggacagattatcgacgtcacgccttctctttataccgttctgctggtcgggacgagcgacaagctggatgcgttcctggcgtccgtacgggatgtcgcaaaaattgtcgaggtggcgagatcgggggttgtgggtctgtcacgcggcgagaaaatcatgcgttagttgtcaaaaaggttcgcctctttctgcccggtcaccaaagccgggcttttttttgcgtaatcagccgacaacgcagataaaagcggttgccgcgaaggcttttctgcgtttagatgttaaaagaattaaccataaccttgacagggccatggactcttttctttttttaaggggcaattgtgaaactggatgaaatcgcccggctagccggcgtgtcacgaacaacggccagctatgtgattaacggtaaagcaaagcagtaccgtgtcagcgacaagaccgttgaaaaagttatggcggtggttcgtgaacataactaccatccgaatgctgtcgcagccggtctgcgcgccgggcgcacccgctctatcggtctggtgatcccggacctggaaaacaccagctatacccgtatcgccaactatcttgaacgtcaggcgcgtcagcgcggctatcaactgctgattgcctgctcggaagaccagcctgataacgagatgcgctgcattgaacatctgcttcagcgccaggtggatgccataattgtttcgacctccttaccgccggagcatcctttctaccagcgctgggcgaatgatccgttcccgatcgttgcgcttgaccgtgccctcgatcgcgagcacttcaccagcgtggtgggtgccgatcaggacgatgccgaaatgctggccgcagagctgcggacgttcccggcggaaacggtgctgtatttgggcgcgctgcctgaactttccgtgagcttcctgcgcgagcagggattcagaacggcatggaaagacgatccgcgcgaggttcactacctctatgccaacagctacgaacgtgaagccgcagcgcagcttttcgaaaaatggctggaaacgcatccaatgcctcaggcgctattcactacctcgtttgcgctcttgcagggtgtcatggatgtgaccttacgtcgtgaaggtaaactgccttccgatctggcgattgccacgttcggggataatgagctgctcgacttccttcagtgcccggtgctggcggttgcacagcgccatcgcgatgtggctgaacgcgtgctggagattgtgctggcaagtctggatgaaccccgcaaaccgaagccgggcctgacgcgtatcaaacgtaacctctaccatcgcggaattttgagccgccaaaaatgaaatgaccggggcggtgcaatctgcccctttttgctgcaataattcgtgcagataattcccggaaagaaattaggataattcttgggaggtcataatcgcctatttttctttattcattttggcttttaaattgccctttaaacaacatctcagcgattttaaacggtactctttgtattattttgttacaaaccctcttcggtcgatgaatattcagacgttttttcctcttcctttgacagcttacgcgataaccactgcgcttaccgcttgcctgagtgaatctggcgctgtcatcccctgggaatctgtcataaaatgctgcccgcgtcgcaaactgacactttatatttatctgcgatgatattgagtgagccttaacgctagtgtgcatattcggtttttttcttacaaatattcataacgttaattttgcctcgccagttgtgcagttattaaccaggactgtttatctctgtaaatagagggctttcgagtccttatgccgagagtcctggcttgacaagcttttccctcgctccgtaaactcctttaggtgggaatttgtgggttaaagtggtgaggaggggtgagactggcatgttccgtggagctacgttagtcaatctcgacagtaaagggcgtttatcggtaccaacccgataccgcgaccagctgattgagaacgctgcgggtcaaatggtttgcaccattcacattaactccccctgcctgctgctttaccccctgcctgaatgggaaattattgagcaaaagctgtcgcgactgtcgagcatgaacccgcaggaacgccgcgtgcagcggttgttattgggacatgccagtgaatgtcagatggataacgcagggcgattactgatcgcgcctgtgttacggcaacatgccggtctgaccaaagaagtgatgctggtcgggcagttcaacaaatttgaactgtgggatgaaacgacctggtatcaacaggtcaaggaagatatcgacgctgagcagtctgattccgcgacattatcggaacggctgcaggacttgtctctataaatatgatggaaaattataaacataaaacggtgttactggacgaggccgttaacggcctgaatattcgtccggatggcatctacattgatggcacttttggtcgcggtggtcactcgcgtttgatcctctcccaactgggtgaggaggggcgtctgctggcaatcgatcgcgatccgcaggcaattgccgttgcacagactatcaatgacccacgcttttccatcgtgcatggacctttttctgcgctcgcggactatgtggctgagcgcggcctgacgggcaagatcgacgggattcttctcgatcttggcgtctcttcaccccaacttgatgatgctgaacgcggtttctcctttatgcgcgatggtccgctggacatgcgtatggacccgactcgcggccagtctgccgccgagtggttacagaccgctgatgaagcggatattgcatgggtcatcaaaaccttcggcgaagagcgctttggcaaacgtattgcgcgcgccattgttgagcgcaatcgcattgagccgatgacccgcaccaaagagttggccgaggtgatcgcggcggcaacgccggtgaaggataagcacaaacatcccgcgacccgtaccttccaggcggttcgcatctgggtaaacagtgaactggaggaaatagagctggcgctaaaaagctcgctcgacgtgctggccccgggtgggcggttatccatcatcagcttccattcgctggaagaccgtattgttaaacgctttatgcgtgaacaaagccgcggtccacaggtacccgcggggctgccgatgacggaagaacaactcaggaagctgggtggccgtcagttgcgagcattaggcaagttgatgccgggcgaagaagaagtggcagagaatccacgcgcccgtagttcagtgctgcgtgttgcagagaggacgaacgcatgatcggcagagtgacagagaccctaagcaaagttaaggattcgttaggaagcaacgagcgccatgccttgcctggcgtgatcggcgacgatcttttgcggtttgggaaactgccactctgtctgttcatttgcatcattgtcacggctgtgacggtggtcaccaccgcccaccacacacgtttattgactgcgcaacgcgagcagatggtactggaacgcgatgcgctggatattgaatggcgaaatctgatccttgaagaaaacgcgctcggcgatcacagccgggttgaacggatcgcaacggaaaagctgcagctgcagcatgttgatccttcacaggaaaatatcgtagtacaaaaataagggaaaacgcgacgcatgaaagcagcggcaaaaacgctaaaaccaaaacgtcaggaagaacaggccaactttatcagttggcgttttgcgttgctttgcggctgcattttactggcgctgggttttctgttgggccgcgtggcctggctgcagatcgtcgcgcctgacatgctggtacgccagggcgatatgcgctctctgcgcgttcaggaggtctccacgtcccgcgggatgatcaccgaccgctccggtcgtccgctggcggtgagcgtgccggtgaaagcgatctgggccgatccgaaagaactgcacgacgccggtggcattacccttgataaccgctggaaagcgctggctgatgcgctgaaaatgccgctggatcagctggcctcccgcgttaacgcgaacccgaaagggcgttttatctatctggcgcgtcaggttaaccctgacatggcggactacattcgcaaactgaagctaccgggcattcatctgcgtgaagaatcccgtcgttactatccatccggcgaagtaaccgctcacctcattggctttaccaacgtcgacagccaggggattgagggcgttgaaaaaagcttcgataagtggctcaccggtcagccgggcgagcgaatcgtgcgtaaggaccgctacgggcgcgtcatcgaagatatctcttccacggacagtcaggcagcgcacaacctggccctcagtatcgacgagcgcctgcaggcgctggtctaccgcgagctgaacaacgccgtggcgttcaacaaggcggagtcaggcagcgccgtgctggtggatgtcagcaccggtgaagtgctggcgatggccaacagtccgtcctacaacccgaacaactttaccggcaccgcaaaagatgccatgcgtaaccgggcgattaccgacgtgttcgaacccggctccacggtgaagccgatggtggtgatgaccgcgctccagcgcggcatcgtcaatgaaaacacggttctgaacactgtcccataccgtattaacggccacgagataaaagacgtggcgcgctacagcgaattgaccctgaccggggtgttacagaagtcgagtaacgtcggtgtttcaaagctggcgttagcgatgccgtcctcagcgttagtagaaacttactcacgttttggactgggaaaggcgaccaatttggggttggtcggagaacgcagtggcttatatcctcaaaaacaacggtggtctgacatagagagggccaccttctctttcggctacgggctaatggtaaccccgttacagttagcgcgagtctacgcaacgattggcagctatggtgtctatcgcccgctgtcgattaccaaagttgatccaccggtcccgggcgagcgtatcttcccggaatccatcgttcgtaccgtggtgcacatgatggaaagcgtggcgctgccgggcggcggcggcgtgaaggcggcgattaaaggctatcgtatcgccattaaaaccggtacagcgaaaaaagtggggccagacggccgctacatcaacaaatacattgcctataccgcaggcgttgcgcctgcaagcaatccgcgttttgcgctggtggtcgtgataaacgatccacaggcgggtaaatactacggcggcgccgtctccgcgcctgtgttcggggccatcatgggcggcgtgttacgcaccatgaacattgaaccggatgcgctggcgacgggcgaaaaaagtgaatttgtaattaatcaaggcgagggtacaggtggcagatcgtaatttgcgcgaccttctcgctccgtgggtgccaaatgcaccggagcgagcactgcgagagatggttctggacagccgcgtagcggcttctggcgatctttttgtggcggtggtcggtcatcaggcggacgggcgtcgttatatcccgcaggcgattgcgcaaggtgtggctgccattattgctgaggctaaagatgaggcaaccgacggtgagatccgtgaaatgcacggcgtgccggtcatctatctcagccagttaaacgaacgtctttccgcactggcgggacgtttttatcacgaaccttccgaccagctgcgtctggttggcgtaacgggtacgaacggtaaaaccaccaccacgcagctgatggcgcagtgggcacagctgctgggtgaaaccggtgcggtgatgggaaccgtgggtaacggtctgctgggcaaagtgagcccgacggaaaacaccaccggctcggcggttgacgtacagcacgtgcttgctggtctggcagggcagggcgcaaccttcgccgcgatggaggtctcttcgcacggtctggtacagcaccgcgtcgcggcgctgaaatttgctgcatccgtgtttaccaacctgagccgcgaccatcttgattatcatggcgatatggagcactacgaagccgcgaaatggctgatgttctctactcaccattacggtcaggccatcatcaacgccgacgatgaagtgggccgccgctggctggcgaagctgccggatgcggttgccgtctcgatggaagaccatatcaatccgaactgccacggccgctggctgaaggcggttgaggtgaattatcacgacagcggggcgaccatccgctttgcctcttcctggggtgaaggcgaaattgaaagccgcctgatgggggcgtttaacgtcagcaacctactgctggccctggcaacgctgctggcgctgggttacccgatggctgaactgctgaaaaccgccgcgcgactgcagccggtttgtggccgtatggaagtatttagcgcgccgggtaagccgaccgttgtggttgattatgcccacacgccggatgcgctggaaaaagcgctggaagcggcgcgcctgcactgtaccggtaagctctggtgcgtgtttggctgcggcggcgatcgcgacaaaggcaaacgcccgctgatgggggcgattgcggaacagttcgcggatattccggttgtcaccgatgacaacccgcgtaccgaagagccgcgcgccatcattaatgacattctggcgggtatgctggacgcaggtcgcgcgcgcgtcgtggaaggccgggcggaagccgtgacgaacgccatcatgcaggcacaggagaatgatgttgttctgctggcgggcaaaggccatgaagattatcagatcgttggcaatcgccgtctggactactcggatcgcgtaacggcagctcgcctgctgggagttgtcgcatgattagcctctccttaagccaggccgcagaagtactgcacggcgacctgcacgggcaagacctgaccatcgatgccgtgacgacggacacccgtaaagtcaccgcaggctgtctctttgtggcgctgaaaggcgagcgttttgacgcgcatgattttgccgagcaggccaaagagaacggcgccggtgcgctgctggtcagccgcaagcttgatatcgatctgccgcaggttgtggtgaaagatacgcgtctcgcgttcggtgagctggctgcctgggttcgtcagcaggtgccggctcgcgtcgtcgcgctgacagggtcatcaggcaaaacgtcagtgaaagagatgacggcggcgatcctcagccagtgcggcaatacgctttttaccgcgggcaacctcaataatgacatcggcgtgccgatgacattgcttcgcctgaccaaagagcatgactatgcggtgatcgagttaggcgcaaaccaccagggtgaaatcgcctggaccgtgagcctgactcgcccggaagcggcgctggtgaataacctcgcggctgcgcacctggaaggctttggctcgctggaaggcgtggcgaaagcgaaaggtgaaatttacaccggcctgccggataacggtattgccattctgaacgccgataacaacgactggcttaactggcagagcatcattggtgcgcgtaaaacctggcgcttctcaccaaatgcggccaacagtgattttacggcgaccaatatccatgtgacgtcgcacggcaccgagttcaccctcactaccccaacgggtggcgtggaggtgctgctgccgctgccgggtcgccataacatcgccaatgcccttgcggcggcggcgctggcaacggcggtgggcgcttcacatgcggcaatcaaagccgggctggcgaacctgaaagccgtgccgggacgcctgttcccgattcagctttcggaaaacaagctgctgctggatgactcctataacgcgaatgttggctcgatgacggcggcggtgcaggtgttatctgaaatgccgggctaccgcatcatggtggttggcgacatggcagaactgggtgacgaaagcgaagcctgtcatacccaggtcggtgaagcggcgaaagcggcggggctggactgtgtactgagcacaggaaaattgagccaggcgattagccaggccagcggcgttggcgagcattttgccgataaagccgccttgattgagcgccttaaggcattaatgacagaaaaacaaattgtgacagtgttagtgaaaggttcacgtagtgccgccatggaagaggttgtgcacgcattacaggagaacgggacatgttagtttggctggccgaacatttggtcaaatattactcaggctttaacgtcttttcatatctgacgtttcgcgccatcgtcagcctgctgactgcgctgttcatctcgttgtggatgggcccgcgcatgattgcccgtctgcaaaagctctctttcggccaggttgtgcgtaacgacggcccggaatctcacttcagcaagcgcggtacgccgaccatgggcgggatcatgatcctgactgccatcgtcgtttccgtgctgttgtgggcgtacccgtccaacccgtacgtctggtgtgtgctgacggtactggtgggttacgggatcatcggtttcgtcgatgattaccgcaaagtcgtccgcaaagataccaaaggcctgattgcccgctggaagtatttctggatgtcggtgatcgcgctgggcgtggccttcgcgctgtatctggccgggaaagacacgccagcgaccgagctggtcgtgccgttctttaaagacgtgatgccgcagctgggtctgttctacattctgctggcgtactttgtgattgtcggcaccggtaacgccgttaacctgaccgacggtctggatggcctggcaatcatgcctaccgtcttcgtggcggccggttttgcgctggtggcgtgggcgaccggtaacatgaactttgcgaactacctgcacatcccttatctgcgtcatgcgggtgaactggtgatcgtctgtacggcgattgtcggcgcgggtcttggcttcctgtggttcaacacctatccggctcaggtctttatgggggacgtcggttcactggctttgggcggcgcgctgggcattattgccgtgctgctgcgccaggagttcctgctggtgatcatgggcggcgtgtttgtggttgagacgctgtcggtgattttgcaggtcggctccttcaagctgcgcggtcagcgcatcttccgtatggcgccgattcaccaccactatgaactgaaaggctggccggagccgcgcgtcattgtgcgcttctggattatttcgctgatgctggtgctgattggcctggcaacgctgaaggtacgttaatcatggcagattaccagggcaaaaaagtcgttatcatcgggttgggcctcacggggctctcctgcgtggactttttcctcgcgcgtggcgtgacgccgcgcgtgatggatacgcgtgtctctccgccgggtctggacaagctgcctgaacaggttgaacgccacctgggtggtctgaatgatgactggctgctggcagccgatctgattgtcgccagcccgggtatggcgctggcgcatccttccctgagcgctgccgcagatgcgggcgttgagattgttggcgatatcgagctgttctgccgcgaagcgcaggctcccgttatcgcgattaccggttctaacggtaaaagcaccgtcaccaccctggtgggggaaatggcaaaagcggcgggcatgaacgtcggcgttggcggtaacattggtttgcctgctctgatgctgctggataaaggctgtgaactgtatgttctcgagctttccagcttccagctggaaacgacctccagcctgcatgctgccgctgcgacgatcctcaacgtgactgaagatcatatggacagatatccctttggtctgcagcagtaccgtgccgccaagctgcgcgtttatgagaatgccaaagtctgcgtggtgaacgccgatgatgcgctgaccatgccggtgcgtggcgcagacgagcgctgcatcagttttggcatcaccatgggtgattaccatctgaaccgccagctgggcgaaacctggctgcgcgtgaaaggtgagaaagtgctgaacgtgaaagagatgaagctctctggtcagcacaactataccaatgcgctggcggcgctggcgctggcggatgccgtggggctgccgcgctcctcaagcctgaaagcgttaaccacgttttctggcctggcgcaccgtttccagctggcgctggagcacaacggcgtgcgctggatcaacgactccaaagccaccaacgtgggcagcacggaggccgcgctgaacgggctgcacgttgacggtaccctgcatctgctgctgggcggcgacggtaagtctgctgatttctcgtccctgaagccgtatctctcaggcgataacatccgtctctactgcttcggccgtgacggcagcgagctggctgaactgcgccctgagatcgccgagcaaaccgaaaccatggaacaggcgatgcggctgattgcccctcgcgtgaagccgggtgatatggtgctgctctctccggcctgtgccagtctcgatcaattcaagaatttcgaacagcgtggtgatgtctttacccgcctggcgaaggagttaggctgatgcgtttatctctccctcgcctgaaaatgccgcgcctgccaggatttgggatcctggtgtggttgtttgcggcgcttaaaggctgggtgatgggctctcgtcaaaaagataacgacagcctgatcatgtacgaccgcacgctgttctggctcacaatggggctcgcggcggtcggctttattatggtgacgtcagcgtcaatgcccgtcgggcagcgtctggcgaacgatcctttcctgtttgccaaacgtgatggtctctacatcatcctggcattctgcctggcgctggtgaccttgcgtctaccgatggagttctggcagcggcacagtacggcgatgctgatcgcctcgatcattatgctgctgatcgttctggtggtggggagctccgtaaacggggcatcacgctggatcgcctttggtccgctgcgtattcagcctgcggaatttaccaagctctccctgttctgctacctggcgaactacctggtgcgtaaagtagatgaagtgcgtaacaacctgcgcggcttcttaaaaccgatgggcgtgattctggtgctggcggtcttactgctggcgcagcctgacctcggtacggtggtagtactgtttgtaaccacgctggccatgctgttcctggcgggcgcgaagctgtggcagttcatcgccatcattgggatggggatttcagcggttgtgctgctgatcctcgccgagccttaccgtattcgccgcgtgacctctttctggaacccgtgggaagacccgttcggcagcggttatcagctgacgcagtcactcatggcctttggtcgtggtgagctctggggacagggactgggtaactcggtacagaaactggagtatttaccggaagcgcatactgacttcatcttctccattattgcggaagaactgggttatatcggtgtggtattagcgctattaatggtattcttcgtcgctttccgcgccatgtccatcggccggaaagcgctggagatcgatcaccgtttctcaggcttcctggcctgctcaattggtatctggtttagtttccaggcattggttaacgtcggggccgcagcgggtatgctgccgaccaaaggtctgacgttgccgttgatcagttatggtggttccagtctgttgattatgtcgacggccatcatgctgttgttgcgcatagattatgaaacgcgtctggaaaaagcccaggcgtttacacgaggttcacgatgaatcaaccgaagcggttaatggtgatggcaggcggtaccggcggacatgtgttcccgggactggcggttgcgcaccatttaatggatcagggctggcaggtacgctggctgggaaccgcagaccgcatggaggccgacctggtaccgaaacacggcattgagatcgactttattcgtatttccggcctgcgcggcaaaggcctcaaggcaatgctcctggctccggtgcgcatttttaacgcctggcgtcaggcgcgcaccattatgaagcgctttaggcccgatgtggtgctgggcatgggcggctatgtctcggggccgggcgggctggcagcgtggtcgttaggtattcccgtcgtactgcatgagcagaacggtattgccggtctgaccaacaaatggctggcgaaaatcgccaccaaagttatgcaggcgtttcccggcgcgttcccgaaagcggacgtggtaggtaacccggtccgtgtggacgtactggcgctgccgctgccggacgctcgcctggcgggccgtgaagggccggttcgtgtgctggtcgtcggtggctctcagggggcacgcattttaaaccagacgatgccgcaggttgctgcaaagctgggggatgccgtcaccatctggcaccagagcggaaaaggcgctcagcagaccgttgagcaggcttacgccgaggcggggcagccgcagcataacgtgacggaatttatcgacgacatggcggcagcgtatgcctgggccgatgtcgtggtctgtcgttctggcgccttaacggtaagcgaaatcgctgccgcgggtctgccagccctgtttgtgcctttccagcacaaagacagacagcagtactggaatgccctgccgcttgagaaagccggtgcggcgaaaatttttgagcagccacaatttaccgctgacgcggtcgccaccaccctggcgggctggaacagagacgtattgcttgagatggctgaacgcgcgcgcgcggcggctatccctgatgcgacggaacgggtggcaaaagaagtgagcctggcagcccaggcttaaccctcgcagcgcgtgaagcgcggcacgaattttaagtagtcgatggcgtttagagaatgaatacacaacaactggcaaaactgcgttcaatcgtgcccgagatgcgtcgcgtccggcacattcactttgttggcatcggtggtgccggcatgggcggtattgccgaagtgttagctaacgaaggctatcagatcagcgggtctgacctggcgccaaaccctgtaacgcagcagctggcgtcgcttggggcgactatctatttcaaccatcgcccggaaaacgtgcgcgatgcgagcgtggtggtggtctcaagcgccatctcttctgacaacccggaaatcgttgccgctcacgacgcgcgcattccggtgatccgccgtgccgaaatgttggcggaactgatgcgcttccgccacggcatagcgattgccgggacccacggtaaaaccacgaccacggcgatggtttccagtatttatgcagaagcgggtctcgacccgacgttcgtcaacggcggcctggtcaaagccgcgggcgtacatgcgcgtctgggccacagtcgttatctgattgctgaagcggacgagagcgacgcgtcgttcctgcacctgcagccgatggtggcgattgtcaccaacatcgaagctgaccatatggatacctaccagggtgacttcgagaacttaaagcagacctttatcaacttcctgcacaacctgccgttctacgggcgcgcggtgatgtgcgtggacgatccggtgatccgcgagttgctgccgcgcgtgggtcgtcaaatcaccacctacggcttcagcgaagacgctgacgtccgcgtggaagagtacaaacagattggcgcgcagggacacttcacgctggcgcgtcaggacaaagagctgctgcacgtgacgctgaatgcgccagggcgccataacgcgctcaatgccgcagcggcagtggccgtcgcgacggaagaaggcattgatgatgatgcgattctgcgcgcactggaaagcttccagggcaccgggcgtcgtttcgatttcctcggtgaattcccgctggatccggtaaacggtaaagccggtacggcgatgctggtggacgactatggtcatcatccgaccgaagtggacgccaccattaaagccgctcgtgcaggctggccggacaaaaatctggtgatggtgttccagccgcaccgcttcacgcgtacgcgcgatctgtatgacgatttcgccagcgtcctgtcacaggtagacaccctgttaatgctggatgtgtacgccgcaggcgagacgccgattcctggtgcagacagtcgttctctgtgtcgcaccattcgtggacgcggtaaagttgaccctattctggtttctgaccctgcgcaggtggcggaaattctggcaccggtcctgacaggtaacgatctgattctgattcagggcgcgggaaatatcggcaaaatcgcccgtaccttagctgaaatcaaactgaagccgcaaaaccaggaggatgagcatcatggctgataagattgctgtcctgtctggcggcacctccgccgagcgcgaggtttccctgaattccggcgccgctgtactggcgggcctgcgtgaaggtggcgtcaatgcgcacctggtcgatccaaaagaggtcgacgtgacgcagttaaaagccatgggcttcgataaagtctttatcgctttacacggtcgtggcggcgaagacggcaccctgcaggggcttctggatctgatcggtctgccatacaccggcagcggcgtgatggcgtctgctatctctatggataaactgcgcagcaagctgctgtggcagggcgcaggtttacctgttgcgccatgggtggcactgacgcgtcgcgaatttgaattgggcctgccggatagcgttaatgcacgcattgctgaactgggcttaccggttattgtaaagcccagtcgggaaggctccagcgtgggaatgtccaaagtcgacaaagctgacgatttagcgtccgctttagcgctggcatttcaacatgatgatgaagttctgatagaaaaatggcttagcgggccggaatttaccgtcgcgatgcttggcgaagaaattttaccgtcaatccgtatccaacccgccggagtcttctatgattatgaggcgaagtatctctctgatgagacgcaatatttctgcccaagtggtcttgaagctgagcgtgaagccgatttacagtccctggtgcttaaagcctggcatgttctgggttgccagggctggggacgcatcgatgtgatgcaggaccgggatggacaattttatctgctggaagccaacacctctccgggtatgacgagccacagccttgtgccgatggctgcgcgtcaggcggggatgagcttctcgcagttagtcgtacgcattctggaccaggcgggctgatatgtctcaggctgcattgaacacgcgcaaccgcgatgacgaggaagaatacacctcttcacgccgcagtaatggaacgcgtcttgcaggcatcattttcctgctcggggtgctgtgcaccgtgtttatcagcggctggatggtcctgggctggatggaagatgcgcagcggttgccgctttctaagctggtggtcaccggtgagcgtcactacacgcgtaacgacgatattcgccagtcaatactggcgctgggctcgcctggcacctttatgacgcaggacgtcaatattatccaaagccagattgaacgtctgccatggataaaacaggcgagcgtaagaaagcaatggcctgatgaattgaagattcatctggttgaatatgtgcccattgcgcgttggaatgatcagcacatggtagacgtcgacggaaattccttcagcgtcccgaccgatcgtgtcaacaagcagaatttaccgatgttgtatggccctgaaggcagcgaaaacgaggtgttacagggttttcgtgaaatgggccaggtgctggcgaaggacaggtttacgttaaaagatgctgcaatgacggcgcgccgctcctggcagcttacgttaacgaacggcattaagctcaacctgggacgcggggacaccatgaagcgtctggcgcgttttgtcgaactttacccggttttacagcagcaggcacagactgacggcaaacggataagctacgttgatttgcgctatgactcaggcgcagcagtcggttgggtaccggctccggtcgaggaacctaatcagcaacagaatcaggcacaggtacaggcagaacaacaatgatcaaggcgacggacagaaaactggtagttggactggagattggcaccgcgaaggttgccgctttagtaggggaagttctgcccgacggtatggtcaatatcattggcgttggcagttgcccgtcacgtggtatggataaaggtggggtaaacgatcttgaatcggtggtgaaatgcgtccagcgcgccatcgatcaggctgaattgatggcagattgccagatttcttctgtctatcttgccctttctggtaagcacattagctgccagaacgaaatcggtatggtgccgatttccgaagaggaagtgacgcaggaagacgttgaaaacgttgtgcatacggcgaagtccgtgcgtgttcgcgatgagcatcgcgtattgcacgtgatcccgcaggaatatgcgattgactatcaggaagggatcaaaaacccggttggtctgtcaggcgttcgtatgcaggcaaaagtgcacctgatcacatgtcacaacgatatggcgaagaacattgtaaaagccgttgaacgttgtggcctgaaagttgaccaacttattttcgccggtctggcggcaagttattccgtactgaccgaagatgaacgtgaactgggtgtctgtgtggtcgatattggtggtggtacaatggacatggccgtgtataccggcggtgcgctgcgccacaccaaagtgatcccgtacgcagggaacgtcgtgaccagcgatattgcttacgcttttggtacgccaccgagcgatgcagaagcgattaaagtgcgccacggctgtgcgctgggttctatcgttggcaaagatgagagcgttgaagtgccaagcgtcggtggtcgtccaccgcgcagcctgcagcgccagacgttggctgaggtgatcgagccgcgctataccgagctgctcaacctggtcaacgaagaaattttacagttacaggaacagcttcgtcagcagggtgttaaacatcatcttgcggcggggattgtattaaccggcggtgcagcgcaaattgaaggtcttgcggcctgtgcgcagcgcgtcttccatacgcaggtacgtattggggcgccgctgaatattaccggtttaacggattatgctcaggagccgtattattcaacggctgtgggcctgctccactacgggaaggaatctcatctcagtggtgaagcggaagtggaaaaacgcgtctcagtggggtcgtgggtcaaacgactgaacaactggttgcgaaaagagttttaatttttttaagagaccggagagaattagcggtctcgggcgacaggcacaacggagagagaaattatgtttgaacctatggaactgaccaacgacgcggtgattaaagtcatcggcgtcggtggcggcggcggtaacgccgtagagcatatggtgcgtgaacgcattgaaggtgttgaattcttcgcggttaacaccgatgcgcaggcactgcgtaagacggcggtaggccagactatccagatcggcggtggcatcaccaaagggctgggagctggggctaacccggaagtgggtcgcaatgcggctgaagaagatcgtgaagccctgcgcgctgcactggaaggtgcggacatggtcttcatcgcagcaggtatgggtggcggtaccggtaccggcgcagcacctgttgtggctgaagttgctaaagatttaggtattctgaccgttgctgtcgtgaccaagcctttcaattttgaaggcaagaagcgtatggccttcgcggagcagggtatcaccgagctgtccaaacatgtggactcgctgatcaccatcccgaacgacaaactgttgaaagttctgggtcgcggtatctccctgctggacgccttcggtgcagcaaacgacgtgctgaaaggcgcggttcagggtatcgctgaactgattacccgtcctggcctgatgaacgttgactttgcagacgttcgcaccgtgatgtccgaaatgggctacgcgatgatgggctctggcgtggcgagcggtgaagaccgtgcagaagaagcggctgaaatggctatctcttctccactgctggaagatatcgacctgtctggtgcgcgcggcgtgctggtcaacattaccgctggctttgacctgcgtctggatgagttcgaaaccgtgggtaacaccatccgtgcgttcgcctctgacaacgctaccgtggtaatcggtacttcacttgaccctgaaatgaacgacgagctgcgtgttaccgttgtggcaaccggtatcggtatggacaagcgtcctgagatcaccttagtgaccaacaagcagactcagcaaccggtaatggatcgttaccagcagcacggtatgtctccgctgactcaggagcagaaaccggccgcgaaagtggtgaacgacccaacgccgcaaacggcgaaagagccagattatctggatatcccggcgttcctgcgtaagcaagctgattaagaattggctggaattaggggatttgcgctctttgtgctaaactggcccaccgttagtgatatacactctcggttggatagttaatttggcgagattatacgatgatcaaacaaaggacacttaaacgtatcgttcaggcgacgggtgtcggtttacataccggcaagaaagtcacgctgacgttacgccctgcgccggccaataccggggtcatctatcgtcgcaccgacttgaatccaccggtagattttccggccgatgccaaatctgtgcgtgatactatgctctgtacttgtctggtgaacgagcatgacgtgcggatttctaccgtagagcacctgaacgccgccctggcgggcctgggtatcgacaacattattgttgaagtcgatgcgccagaaatcccgattatggatggcagtgctgcaccgttcgtctatctgttgctggatgctggcatcgaagaactgaactgcgcgaagaaatttgttcgcatcaaagagaccgttcgcgtcgaagatggcgacaagtgggctgaattcaaaccgtacaatggtttctcgttggactttaccatcgactttaaccatccggcgattgattccagcacccagcgctatgcgatgaacttctctgctgatgcgtttatgcgccagatcagccgagcccgtacgtttggcttcatgcgtgatatcgaatatctgcagtcccgcggcctgtgcctgggcggcagcttcgattgtgccatcgttgttgacgattatcgcgtactgaacgaagacggcctgcgtttcgaagatgaattcgttcgtcacaaaatgctggacgctatcggcgacctgttcatgtgtggtcacaacatcattggtgcatttaccgcgttcaaatccggtcatgcgctgaacaacaaactgttgcaggccgtcctggcaaaacaggaagcctgggaatatgtgaccttcgaagacgaagctgaactgccgctagctttcaaagcgccaagcatggttctggcgtaacggttcacgccgtttcgttaaaaaatcgactggttaacctggtactctctccggccaggaagaccagtcgtttttatttttacccttctttgtttgtcccagcgttatttcttgtctgtcctgcgtagaaagtgtgtgcgttagctgcattcttgaccgtttttccccgcggcggcacctcattcctgctgatgtgtattggttttagtggtaatatctgggcgcttaaaaaaataactgaagatagcctgtagcaggctggcttatgtggtggagcaagtgagcggaatactgacgcgctggcgacaatttggcagacgttacttctggccgcatctcttattagggatggtcgcggcgagtttcggcttgcctgcgctcagcaacagtgccgaagcggcgacgccgacgaagacctctaccagcaaacacgatctcaatacgcgggttaactttacaaatctcgcctggcttgaagccagtcgccgcccgaatttctccgttgattactggcaccagcacgctatccgcacggttatccgccatctctccttcgcgatggcgccgcaggcaatgcctgttgcggaagaggcgctgccggtgcaggcgcagcatcttgccctgctggacacgctcaacgcgctgctcacgcaggacagacagccgccggttatggttcgccagacggcgcaacgcgcgttcgttcctcctgtttcattctctgtttcaacctggattagccaggttcacggcattcgcgccgggcctcaacgcctcagctaaattaactttttcaataccttaatttatctgcccatgatggggcgtttgagaatttattatgctaatcaaattattaactaaagtttttggtagtcgtaacgatcgtaccctgcgccgtatgcgcaaagctgttgccgtcatcaacggtatggaaccggcgatggagaagctctctgatgatgagctgaaagcgaaaacggcggaatttcgtgcgcgtctggaaaaaggtgaaaccttagaaagcctgatcccggaagcatttgcggtcgtgcgtgaagcaagtaagcgcgtgttcggcatgcgtcacttcgacgttcagctgctgggtgggatggtgcttaacgaacgctgcatcgcggaaatgcgtaccggtgaaggtaaaaccctgaccgcaacgctgccggcttacctgaatgcgttgaccggtaaaggcgttcacgtcgttaccgtcaacgactatctggcgcagcgtgacgccgaaaacaaccgtccactgttcgaattcctcggcatgaccgtcggcatcaacatgtctggcctgcctgcaccagccaagcgtgaagcgtataacgcggacattacctacggtaccaacaacgaatacggcttcgactacctgcgtgacaacatggcgttcagccccgaagagcgcgtccagcgtaagctgcactacgcgctggtggatgaggtggactccatcctgatcgatgaagcgcgtactccgcttatcatctccggcccggctgaagacagctccgagatgtaccgtaaggtcgacaaaatcattccacacctgctgcgccaggagaaagaagactcggataccttccagggtgaaggtcacttctccgtggatgaaaaagcgcgccaggtgaacctgaccgagcgtggtctggtgaaaatcgaagagctgctggtggctgaaggcattatggaagagggcgagtctctgtactctccgagcaacatcatgctgatgcaccacgtgaccgcagcgctgcgtgcccacgcgctgttcacccgcgacgtcgactacatcgtaaaagacggcgaagtgatcattgtcgatgagcacaccggtcgtaccatgcagggacgtcgctggtctgacggtttgcaccaggctgtagaagccaaagaaggcgtggatattcaaaacgaaaaccagacgctggcgtctatcaccttccagaactacttccgtctgtacgagaagctggcgggcatgaccggtacagccgataccgaagcgtttgaattcagctctatctacaagctggataccgtggtcgttccaaccaaccgtccgatgatccgtaaggatatgccggacctggtgtacatgaccgaagcggaaaaaattcaggcgatcatcgaagacattcgcgagcgtactgctaaaggccagccggttctggtggggaccatctccattgaaaaatccgaagtggtttctcacgagctgacgaaagcgggcatcaagcacaacgtactgaacgccaaattccacgccaaagaagcagatattgttgcgcaggcaggttatccggctgcggtaaccatcgccaccaacatggcgggtcgtggtaccgatattatgctgggcggaagctggcaggccgaggtggctgagctggaaaacccaacgcctgaacagattgctcagattaaggccgactggcaggtgcgtcacgacgcggtgctggcatccggcggtctgcatatcattggtaccgagcgtcacgaatcgcgtcgtatcgataaccagctgcgtggccgtgcgggccgtcagggtgatgctggttcttcccgcttctacctgtcgatggaagatgcgctgatgcgtattttcgcctccgaccgcgtgtccggcatgatgcgtaagctgggcatgaagccgggcgaagctattgagcacccgtgggtcaccaaagcgatcgcgaacgcacagcgtaaagtggaaagccgcaacttcgatattcgtaagcagctgctggaatatgacgacgtggctaacgatcagcgccgcgcgatctacacccagcgtaacgaactgctggacgtgtccgacgtgagcgaaaccatcaacagcatccgcgaagatgtgtttaaagccacgattgatgcgcacattccgccgcagtctctggaagagatgtgggacatcgaaggcctgcaggaacgtctgaaaaacgactttgacctcgatctgcctatcaaagagtggctggataaagagcctgagctgcacgaagagaccctgcgcgagcgtatctacgaaaccgcgctggacgtctacaagcgcaaggaagaagtggttggcgctgaaatgatgcgtcacttcgaaaaaggcgtgatgctgcagacgctggattccctgtggaaagagcacctggcggcgatggactacctgcgtcagggtatccacctgcgtggctatgcgcagaaagatccgaagcaggaatacaagcgtgagtccttctccatgtttgcctctatgcttgagtcgctgaagtatgaagtcatcagcaccctgagcaaggttcaggtgcgcatgccggaagaagtggaagcgatggagcagcagcgtcgtgaagaagccgagcgtctggcacaaatgcaacagctgagccatcagaccgacgacagcgaagccgcagcggcgatcgccgcgcaaaccggcgatcgtaaagtgggtcgtaacgatccatgcccgtgcggttctggtaaaaagtacaaggcgtgccacggccgtctgagctaagttcataaaaaaacaaaaaggcgcagaaatctgcgccttttttatggaagtgacaatatgaaaatactgcaaattgccgtcgggattattcgcaacccgcaaaaccaaatctttatcacccagcgtgctgccgacgcccatatggcgaacaagtgggagtttccaggcggtaaaatcgaggccggtgaaaccccggaagcggcgctggttcgcgagcttcaggaagaagtcgggatcaccccgcttggcgcaacgctgtttgataagcttgaataccagtttccggacagacacatcacgctgtggttctggctggtggaaaactgggaaggtgaaccctgggggaaagaggggcagccgggtaactgggtggagcttcaggcaagtgatgccgaaaaattcccgccagctaatgagcctgtgatcctgcggttagtcgaacaaccgaaggcctgctaagcgacgcgccagcaggctttacagattactgctggctttcactccagtcatcgctgtccgaaagatcgcctttactcggaatgcgtttttcttccgccgcccattcgcccaggtcaataagctggcagcgtttgcagcagaatgggcggaacggactcacttcgccccagacaacggttttgccacaggtcgggcagtttacggtggtgacatcagacatcggcactccttaacaacaggccagttcaaaatcgaggcgttccggcacggtgccattttcgctgtccagcggcataaagcgaatcgcaaagcggctcttatgcccggaaatttgcggataaagctgttcgccaagcgataaattcaggcgcagaagatcggcatcatcaccgttgtcctggtagaaaccgttcaggctggtttgcttgcggaacggcgctgagttacggatcagatcgaggatcagcgacagcgtctggtgcatcggctccaggcttgccagccagctgttcacctgcgcgtcacgctgcgcttgtggcatatggagccacatatgcagcgtcggcaggtcgaagctgcagcaaccgccagggatgctcaggcgctggcgcaccaggccaatcaggcggtcctcacgcaaaaactgcccgacgcgcggtgcggccatcaggatgctgctgctggttttaagctgctgacgaagggaatcgatacggcttacgtccacccccggaacctcagcccatgcctgcaatttacgctgctggcgctccagctctttaagcaattctgtgcggacatcgccgcgttcaatcacatccagcagatcgcctacattgcggaagaagtgcaacgccgtagcgtgatcgttaaccggcagatgttgtgaaagctgctgaatgaggaattcgatgcgcagccaggtacgcattttttcgttgagcggatgctcaaaaaggatgtgagtcgacattatggtttttcctgtgcaacggcctgcccggctaacgtcagatactgcgcgtgcagacgggcaacatccgatgcaatagcatctggtgcgccgttattatcaataacatcatccgccacggcaaggcgctgagcgcgcgtggcctgagcggcgagtatatgttcagcatgctcgcgcgagacatggtctcgcatcatggttctctggatttgcgtctcgggtgcgacatcaatcaccagtacccgatcggctttctgatgcagctgattttccaccagcagcggaaccacccacaagacatagggcgagcgggcttcggctatctgacgctgtgtttcctggtggataatgggatggagcagggcattaagccaggctttttccgctgaatcggaaaaaatgcattcgcgaagctgacggcgatttagcgtgccatcggcattgatgattgcctggccaaaatgttctgcgatggccttaagcgcgggtgtattgggctctaccacctggcgggcaataatatcggcatcgataatcgtgatacccaaacgagaaaacgcgtctgcaacggtacttttgccactaccgatgccaccggttaatgcaacgatataccccattaaatcaaatcctgggaattattcattattaaaatcagttgattaaaactctcaggtgcgccagcaactgtttagccctgtttaccggctttttaccaggtaaatttataggattgtagcgtaaaaaaagagaatttcgcagtcttgcggagcaggtattagtgcgtatgatagcgtcactggagttgtgcttttaacatatttgcctctaaccccaggaatccgcacatgcgtatcgaagaagatctgaagttaggtttcaaagacgttcttatccgccctaaacgctctacactgaaaagtcgctcagacgttgaactcgaacgtcaattcacctttaagcattccggtcagacctggtctggcgtgccgatcatcgctgccaacatggatactgtgggaacctttgagatggcaaccgcgctggcacagttcgacatcctcaccgccgtacacaaacattacagccctgaagagtggaatgcgtttgtggcgtccgcctctgctggtgtggtgaagcacgtgatggtctccaccggtacctccgatgcggatttcgagaagaccaaacagatcctgaaggctaacccggcgctgaacttcgtttgtattgatgtggcgaacggttactccgagcacttcgtacagtttgtcagcaaggcgcgtgaggcctggccgacgaaaaccatcatcgcgggcaacgtggtgaccggtgaaatgtgtgaagagctgatcctctccggtgccgatatcgtgaaagtgggcatcggtccgggctccgtatgcaccacgcgcgtcaaaaccggcgtcggttatccgcagctctctgccgtcattgaatgtgccgatgcggcgcacggtctgggcggccagatcatcagcgacggtggttgcaccatgccgggtgatgttgcaaaggccttcggcggcggcgcggacttcgtgatgctcggcggtatgctggcaggccatgaagagagtggcggtaccgtagtagaagaaaacggcgagaaatttatgctgttctacggcatgagctctgagtctgcgatgacccgtcacgtcggcggcgtggcaaaataccgtgcggcagaaggtaaaaccgtcaagctgcctctgcgcggcccggttgaaaacaccgcacgcgatatcctcggcggcctgcgctctgcctgcacctacgttggcgcctcccgcctgaaagagctgacaaagcgtacaacgtttattcgcgttcaggaacaagaaaaccgcgtattcaacagcctgtaatggctatcgctggcgcatgcccgtgcgccagccctgttgtactatcccgcgctcatcgcatctcccaggtggaatatcggcaggtacattgccaccaccagcgtaccgataatgacccccgtcactatcagaagcactggctccagaagcgccgccagattctctgcacgttgaaaggtctgttccgtatgatggcgggcaaggtttgccagcatgatatccagcgcacctgacatttcaccggttcgtaaaagctgaacacagagcggggtaaagattgccgctctttgaaaggatgaccagacgggaaggcctttttcaatgtcctcccgcacgccgcgcagtattccctgccagtactgactttcaacggtctcctcggcactctccaggccctttaaaaaggggatacccgcctgttgcgtgagtgacagcacggtaaagacgtgtcccagcttttgaccttttgccagtgcgcccatcacgggcgtatgcagcaggatgcactgccagcgaggattctgccgcagagcccaggcgacggctaagggggctaatagcaggacgaacaacgcaagggcatatgactgcataaaggcggccatccccataaccatctgtgtcagcacgggaagcggggtattaaacgttttgtagatcgcggcaaactcgggcaggaccagagtgaccatcgccagcacgacgagcacagccagcgtcaggacgatcgccgggtagcgcagcgcctttttcacttttgcactgagctgctgctgcgctttttgttgctgcgcgagctgacgacagcacacctccagcttccccgtcagctctccggttttcaccatcgagacatgcagcgggctaaaaacggctggccacttttttagcgactcagaaaacgggcatccttcactgagctcatcggcaatgctttgcagcagcgcctgccacggttttgacggatgttgctctgcaagcatttgcaggctgtgggacagcatcagcccagcctgcagaagcagggcgagctgatgaaacatctcgtcgcagtggtgtggccgccagcggtgtcgctgcgcgcatcgggtcagcgtcaaaggatggaggtcgttacgcatcagccgggtgaaggccgcattgcggtctgtggcccagagtgtcccgcttcggggctctccatctttggtgagcgcacgccagcgccagagctgattagccgccattgggcattcccaggacgcgcaacaactcttcaatcgtggttagcccttgttcgacggccctgcagccgtgttcaaaaagagaaaccatccccgcctgccgggcgctcgcctctatgacgtcagttcccgccccgctggcaatggcctgccgcagggcattgtcgatggcgagtacttcaaaaatggccacgcggccataaaagccgtgataacagcgatcgcagccggtgggctgccagcgtggaagcggcctgggccatactgagcgaggtagttgagcctgatcgcgggtttcccggcgacaatgtgggcacaaacgccggaccagtcgctgggcaatcaccatcgtcagcgcggaagaaatcatccagcgcgcgacgcccatctgctccaggcgaatcagcgtttccgtcgtcgagttggtgtgcagggtcgacagcaccagatgcccggtctgggcagcattaatggcaatcccggccgtttctccgtcacggatttcgccgaccataatgatgtcgggatcctgacgtagcagtgcgcgcagcacgttctggaaggttaaacccgcccggggattaatctgcgtctggtttaatccggcaagggggatctcaataggatcttccacgctgcagatgttgacgtcaggggtgttacgcgactgcagcgcgctgtacagcgtcacggttttgccgctgccggtagggccggtgaccagaatcagcccctgcggctggtggagaaccgcattaaaacaggccaactgttcagcattcatgccaagcgctttcggctcaagggcctgcggaacctgatgcaggaggcgcagcacaattttttcgccgccgctgcagggaagcgtcgcgatccgaaacgagaccggctcattggccagttcaatcgtaaactggccgtcctgaggcagccggcgttctgcaatatccaggttacccagcacttttaaacgtgcgcttaacaggttagccagttcagcggcaagcggaggctgcggacaaagtacgccgtcgatacgtaaacgaatctggcacgcgtgctccatcggttcgatatgaatatcagaggcgcgctggttgattgcctgctgcagcgtgtggttaaggacatctaccgtagagtgtgtttgcgaaacgccgggcagatgcgattgtgacgtgagctgccggtgtttttctatgcgctccgcgctccagcactcaatatcaatccgtttctgggtcgcgaaacgcagcgcctccatgagttcggtcgcgggctttcccacgacggcaatgttgatcctctcactgtcgctggatagcagcagtgcgtgatggcgaagacaaagcgccacgagttgatcggtattcattctccgctcctcagttattgctgaagcggaaaacgtcttcgcaggcctgcttcagagcgctatcagcactgatgttgcagacgcgcgtccagcccgtcatcccgttgccgttgttccactgcggcgtcatgaccacttccagcccgttaagactttcctgtcctgttaaggtcacgatccctttcgctacgctcattccggaaacgtagcgtgtcgtggtgggggaagggatgccgttgctgttggcatcgcagctctccacaccaccgtgatccagcgcgcaaagttcaatggcggtgcggtagggaacgaaggtttgcagcatatcggtcagcgccgctttgcgcaggtagttctgataggcaggtatgccgatggcgctcagaatcgcaataatgccgatgaccaccatcagctcaataagagtgaatccgtgttgtctgttcatatctgctccttacgttaagtgacgctactctgtcagcgcaaaagggcagaaacgaggggcaaaaaagggaacgggaaagcgcgttcagagaattaatgcggtgttgcaggaaagaacagcggatttgcgagcggggctgaaattcccctctccaggcggagaggggaggaatcactatttaaaacgcatcgagaggtcgagtgcgcgaacgtgcttggtcagcgcgccgacggagatgtaatccacgccggtttcggcgaattcacggatcgtttcgaaggtgacgttcccagagacttcgagctgggcccggccattggtcagttttaccgcctcacgcatctgctcggtttcgaagttatcgagcatgatgatatcggccccggccttaatcgcctgctccagctcgtccaggttttccacttctacttcaaccggcacatccggatgcagccagaaggccttctccaccgcctgacgtacggaacccgatgcaataatgtggttctctttaatcaggaaagcgtcggacaggcccagacgatggtttgcgccgccgccgcagagcaccgcgtacttcagcgccgtgcgcaggcccggcagcgttttgcgggtatccagcagctgggttcgggtgccggccagcaggtcaacgtaacgacgcacttcgctggcgacgccagagagcgtttgtacaaaattgagcgcggtacgttcgccggtcagcaagacgcgggaagggccgtccagctcgaacagcggctgatttggcgtgacgctatcgccgtcctccacgtgccatgtgacctgcacatcatcgcccgccagctgggtaaagacctcttctacccagcgcttgccgcaaaaaacaccctcttcacgggtgataatgaccgcgtgggagcgcgtctctttcggcaacaattgtgcggtaatatctttatcggcattgacgtcaccgcccagatcttctttcaaagcatgggcaacgcttgccggaatatccatattaatacgttccagaagcgcttcacgtcggtggtcggggttgtagcggcgaggcggcatgataaaactccaaattggtaacgaatcaaaatattgaaacatgctactctgaaccgagtaacagcaccatacataaggagttccagcatgttgttagaaaacggatggctggtggatgcgcggcatgtgccttcgccgcaccacgactgccgcccggaggatgaaaagcccacactgctggtggttcataatattagtctcccgccgggggaatttggcggcccgtggatcgatgcgttattcacgggaacgatagatcccgatgcccatcctttctttgctgagattgcgcatctacgcgtgtcggctcattgcctgattcgtcgcgatggtgaagtggttcagtatgttccctttgataagcgcgcctggcatgccggggtgtcgatgtatcacgggcgcgaacggtgcaacgatttttctatcgggatcgaactggaaggcacggataccacgccctacaccgattcacagtatcaacagctagcggctctgacccgcacgcttatcggactttacccggccatcgccgacaatattaccgggcacagcgatatcgctccggcgagaaaaaccgatcccggcccggcatttgactggccgcggttccgcgccatgctcaccgcgtcgtcagaataaggagataccatgacgttgtttaccatgctgctggttatcatcgctgaacgcctgttcaagctcggtgagcactggcatctggatcaccggctggaggtgttattccgccgtatcaagcacttttccatgctgcgcacgctgctgatgatggcgggtgtgatggtgattacgttcctgctgctgcgcgcgctgtatggactctttttcaacgtgccgctgctggtggtgtggatcctgctcggcgtgctgtgcattggtgcgggcaaggtgcgtttgcactatcacgcgtacctgaaagccgcctcccgtgacgatgcccatgcgcgcaatgccatggcgagcgagctgacgatgatccacggcgtgccgccggactgcgacgaacgcgagttcctgcgcgaactgcagaacgcgctgctgtggattaacttccgttactacctggcgccgctgttctggtttgtggtgggcggtccatggggaccggtcttgctgatggggtatgcgttcctgcgcgcctggcagacctggcttgcccgctatctgacgccgcacgagcgtttgctgtccggcattgatgccatcctgcacgtggttgactggcttccggtgcgtctggtgggcgtggtgtacgcgttaattggccacggtgaaaaagcgctgcccgcgtggttcgcctcgcttgccgaccgccatacgtcgcagtatcaggtgttaacgcgtctggcgcagttctcgctggcgcgcgagccgcataccgacaagattgaaacgccgaaagccgctgtctccatggcgaagaaaacgtcgtttgtggtcgtggttatcgtggcgctgctgacgatctacggcacgctggtgtaagccagcgcggcgtaacgattaaagcgtgtccgcaggcgggatgccgaaatcaggcatcccgttttcgtcccagcggacgcgcttcaggcgggtatggcggtttggatcgtacagcggatcgccctcaatttcggtgtagttccgcgcgtgatacaccagcacatcttccccttccggcgtttgcgtaaagctgttgtgtcccgggccgtactgacgattttcgtagctggtggcgaatacggggcgcggggatttgtgccagttcaatgggttttgcggatcggcattcaggtctatccacagcagccccatgcagtagttctcatcggtggcgctggcggaatagctgataaacagtttgttgccatggaacagcaccgccgggccttcgttgacccagaacccgcgacactcccagtcatactccggcttgctgagcatcaccggctcgcctttcagcgtccacgggttcgccatttcacacagataaaggttggagttcccggagatgtccggcgctttttgcgcccacagataccagcgttttccctgatgcacaaaggtggtggcgtccagggcgaaggtgtcgaacggggttttgatctggcctttttctacccacctgccggtgagcggatcgtcgtcggtacattcaatggcaaacatgcggtgctggaacatcccgagcgcgtcgagcgcctgggtgtgcgtcgcggcaaaatagatgtaccactttccgtcaatgtggtgcagttccggcgcccatatcagctggctcattgggcctgcgtcgggtttacgccagaccaccacctcttcggcatgacgtaagccttccagcgagtctgcacggcggatcgccagcctgtcgtactgcggcacggaggcgataaagtaatattgcccatcgtggcgcaggatatacgggtcggcgcgttgttcaataaacgggtttggccaggtttgcattcggctttccttatttagtctcagcggctttcagttcctgataatcgttcagctcgtggtagttgttgcggcgtttttccagatcgagctggatctgcttcatggtttcacgatccaccttcagcaggcgcaccacgcccgcggtaatcaaataacccacccccgggataacggtaaacagcagcacaatcccgttgatggcgtctgcgctttgcgctttcgcgcccgcatcgtagccgtaccaggagagcagaaaaccaaccatcgccccggcaatcgccagacccagtttgaggaagaagatgttgcccgagaagctgatgccggtgatgcgcttcccggttttccactcgccgtagtcatccacgtcggccatcagcgaccagtgcagcggagacgggatctggtgcaggatgttcagcaggacgtagagcaccacgatggtgacggtcgctttcgggtcgaagaaataaaaggcgcaggagaaaatcgccagcacgatgttggtccagaagaagaccttcagcttgcaccagcggtcggtcagcacttttgccagcacgctgccgagcatcatgccgacaacgcccaggctgataaacagcgtggcgaagtgggtgctctggcccatcacccaggtgacgtaatacatggtggccgccatgcggataaagcccgggcagacgttgcagagcgtcaggagcagaatgcgcacccactggtcgttcttccacacgtctttcagatcgtttttcagctcgtcgttggtctgcaccgccgggcgcacgcgctcgcgcacggtggcgaagcagaacaggaacatgcaggtgccaatcagcgccagcacggtcatggccatctggtagcctttggctttgttgtccccgccaaaccagtcggccatcggcagcagcgttaatgagagcagcagcgtggcgatgccgaccagcacgaagcgatacgactggcaggccacacgttcttttggatcgttagtgatcaccccgcccagcgagcagtaggggatgttgatggcggtgtaggtgagcgacagcaggaagtaggtgacaaaggcatagataactttgctgttatagctccactctggcgtggtgaacatcaggatgctgaacagcgcgtacgggaaagcgatccaaagcagccatggacgaaaccggccatatttactgcgggtgcggtcggcaatcgcgcccatgatcgggtccgtaacggcgtcaatcacgcggacggacagcagcagcacgccgaccagcgcaggggccagaccaaaaatatccgtataaaaatagctaacaaacagcatgatggcgccgaagatgatgttacatccggcgtcgcccatcccatagccgatcttttcttttactgacagctttgcgttatccattgactgctctccgggttacggtatggagagaattattcgctggcgaagggatatatgcgttgcagtatcagggcggtgatatggataaatgcgctgtgggcgtgaaagtgtgaaggaggtaacaacgcgcggcacccgcaaaagcaggcaccgcggtgggaggcttagtgcgccttcatggcattacggcttttctgactgaagagatagccaacgccgagtactgcaatccagaccgggatcaggtagacggaaatcgccatacctggggtgatcagcatgatcaccagcacggccgccatgaacagcaggcagatccagttacccagcggatagagcagggcagggaagcgcgtggtgacgccctgctgctgcttcgcgcggcggaacttcatgtgcgccaggctgatcatcgcccagttgatgaccagcgcagagaccaccagcgccatcagcaggccaaacgccgattccggtgccatgtagttaatgagcacgcacagggcggtcacgatggcggaaacaatgatggtattcaccggcacgccacgtttatcaacgttaagcagcatcttcggcgcgttaccctgctgggcgaggccgaacagcatgcggctgttgcagtatacgcagctgttgtaaacggagagcgctgcggtcagcaccacgatgttcagcgcgttggcgacaaaggtatcgcccagctcgtggaagatcagcacaaacgggctggtgtcagcagtcacgcgcgtccacggcagcagcgagagcagcaccgccagtgagcccacatagaagatcaggatgcggtagataacctgatttgtggctttcgggatgctctgctccggattgtcggcttcagcagcggtgatgcccaccagctccaggccgccgaaggagaacataatgatcgccatcatcatcaccaggccggtcatgccgtgaggcaggaagccaccctgttcccagaggttgcgcaccgtggcctgcgggccgccgttgccgctgaacagcagccagccgccgaagataatcatcgccaccacggcaatgaccttgatgatggcaaaccagaactccatctccccgaacactttaacgttggtcaggttaatggcgttgataatgacgaagaaggctgcagcagaagcccaggttgggatttcgggataccagaactgaatgtatttcccgacggcggtcagttcggccatggcaaccagaacgtacagcacccagtagttccagcccgaggcgaaaccggcaaagctgccccagtacttataggcaaagtggctgaaggagcctgcgaccggctcttccacgaccatttcgcccagctggcgcatgatcagaaaagcaatgaaacccgcaatcgcgtaacccaaaataatgcccggaccggcagactggataacggatgcgctgcccagaaacaggccggtaccaatcgcaccgcccagtgcgatgagctgaatatggcggtttttaagcccgcgctttagctgatcgccgtgctgttgagcttccatttgaaacctcgtgtgtggttgttatgttcacgctgagcgtgtgtaattatgaaaatccatattctgtatttatttctttacggttaacgagaccgaaaaaagcggagatgacttccgtaagcgccagaatagtggtaagtgcctgcgaatgcacctgctttatgaaggggtgatgacgacttgaataaaaagaaagcatttgtaaatcggcccgctcgttgttcctcacccaacctatagaatagaaatgcgccttaagtgggcgaattttcattatttgccttgttgaatcgcttcagattgcaaaaaccctcgtttcattatggttaaaactccctctttaggagtaatcaactcatttgtgcaaagttacatttctgaaacgttatttctgtaaggttgttaaaatgtgcagggtttactgatttcaatcaaaaccaatatggacagaaggtgaatactttgttactttagcgatacgaaatagaaattggtaagaccaattgactccgggcaaaaaggcgtaagacagggaatatggcctacagcaaaattcgccaaccaaaactttccgatgtgattgagcagcagctggagtttttaatcctcgaagggactctgcgcccgggtgagaaacttccgccagaacgcgagctggcaaaacagttcgacgtttcacgtccctctctgcgtgaggcgattcaacgtctcgaagcaaagggcttgctgcttcgtcgccagggcggcggaacctttgtgcaaaacagcctgtggcagagcttcagcgatccgctggtagaacttctctctgaccacccagaatcccagtttgacctgcttgagacccgtcacgcgctggaaggtattgcggcctattacgccgcccttcgcagcactgatgaagatcgcgtgcgtatccgcgagctgcatcaggccattgaacgggcacagcagtccggcgatttagacgccgagtccagcgccgtcgtccagtatcaaattgccgtcaccgaagcggcccacaacgtggtgctcctccatctgctacgctgcatggagccgatgctggcccagaacgttcgtcaaaattttgaattgttgtatgcccgtcgggacatgctcccactggtaagcaaccatcgcacccgagtattcgaggcgataatggccggggaaccggagcaggcgcgcgaagcgtcgcaccgccatctggctttcattgaggaaatcttgctggaccgcagccgtgaacaatcgcgtcgcgaacgttcattacgccgcatacagcaacgaaaggattaagcgccaggtacttttagagcgcggcaactaaacgcagaacctgtcttattgtgttcttgcccaagagcacaatgggacaggttccagacaaatcaacgtattagatagataaggaatacccccatgtcagaacgtctccaaaatgacgtggatccgatcgaaactcgcgactggctacaggcgatcgaatcggtcatccgtgaagaaggtgttgagcgcgctcagtatctgattgatcagctgctttctgaagcccgcaaaggcggcgtgaaggttgcttcaggtgcaggggctagcaactacgtaaacacgattgccgttgaagacgaaccggaatacccgggcaatctggatctggaacgtcgtatccgttctgcaatccgctggaacgccatcatgaccgttctgcgcgcatccaagaaagacctggaactgggtggccacatggcgtccttccagtcttctgcgaccgtttacgaagtgtgcttcaaccacttcttccgtgcagcgaacgagaaagacggcggcgatctggtgtacttccagggtcacatctctccgggcatctatgcacgtgcattcctggaaggtcgtctgactgaagagcagatgaacaacttccgtcaggaagttcacggtaaaggtctgtcttcttacccgcaccctaaactgatgcctgaattctggcagttcccgaccgtatccatgggtctgggcccaatcggtgcgatctaccaggcgaaattcctgaagtatctggaacaccgtggtctgaaagacacctctgagcagaccgtatacgccttcctgggcgacggcgaaatggatgagccagaatctaaaggcgctatcaccatcgcgacccgtgagaagctggacaacctgtgcttcatcatcaactgtaacctgcagcgtctggatggtccggtaaccggtaacggcaagatcatcaacgaactggaaggcatcttcgcaggtgctggctggaacgtgatcaaagtcatgtggggttcccgttgggacgaactgctgcgtaaagacaccagcggtaaactgatccagctgatgaacgaaaccgttgacggtgactaccagaccttcaaatccaaagacggtgcctacgtgcgtgagcacttcttcggcaaatatccagaaaccgcagccctggttgcagactggactgatgagcagatctgggccctgaaccgcggtggtcacgatccgaagaaaatttacgctgcactgaaaaaagcgcgtgaaaccaaaggtaaagcgactgtaatcctggcccacaccatcaaaggttacggcatgggtgataccgcagaaggtaaaaacatcgctcaccaggttaagaaaatgaacatggacggcgtgcgctatatccgcgaccgtttcaacgttccagtgaccgatgagcaggtcgaaaacctgtcttacatcaccttcccggaaggctccgaagagcacaagtacctgcacgaacgtcgtcaggcgctgaaaggctacctgccagctcgtcagcctaacttcaccgagaagctggaactgccagcgctggaagacttctctcagctgctggaagagcagaacaaagagatctctaccactatcgctttcgttcgtgccctgaacgtgatgctgaagaacaagtcgatcaaagatcgcctggtgccaatcatcgccgacgaagcgcgtactttcggtatggaaggtctgttccgtcagatcggtatctacagcccgaacggccagcagtacaccccgcaggaccgtgagcaggttgcatactacaaagaagacgagaaaggtcagatcctgcaggaaggtatcaacgagctgggcgcaggcgcatcctggctggccgctgcgacctcttacagcaccaacaacctgccgatgatcccgttctacatttactactccatgttcgggttccagcgtatcggtgacctgtgctggcaggcaggcgaccagcaggctcgcggcttcctgatcggtggtacttccggtcgtacgaccctgaacggtgaaggtctgcagcacgaagatggtcacagccacattcagtctctgactatccctaactgtatctcttacgacccgtcttacgcgtatgaagtggcagtcatcatgcatgacggtctgcagcgcatgtacggtgaagcgcaggagaacatttactactacatcaccaccctgaacgaaaactaccacatgccggcaatgccagcaggtgccgaggaaggtatccgtaaaggtatctacaaactcgaaaccatcgaaggtagcaaaggtaaagttcagctgctgggctccggttctatcctgcgtcacgttcgtgaagcagcacagatcctggcgaaagactacggtgtcggttccgacgtgtactctgtgacctccttcactgaactggcgcgtgatggccaggattgtgagcgctggaacatgctgcacccactggaaaccccacgcgtaccgtacatcgctcaggtgatgaacgacgcgccagcggtggcgtctactgactatatgaaactattcgctgagcaggttcgtacttacgttccagctgatgattatcgcgttctgggtactgacggcttcggtcgttctgacagccgcgaaaacctgcgtcaccacttcgaagttgatgcttcttacgtggttgtagcagcactgggcgaactggctaaacgtggcgaaatcgataagaaagtggttgcagacgcaattaccaaattcaacatcgatgcagaaaaagttaacccgcgtctggcgtaagaggtaaaagaataatggctatcgaaatcaatgtaccggacatcggggctgatgaagttgaaatcaccgagatcctggtcaaagtaggcgacaaagttgaagctgaacagtcgctgatcaccgtagaaggcgacaaagcctctatggaagtcccgtctcctcaggctggcatcgttaaagagatcaaagtctctgttggcgataaaaccgagaccggcaaactgatcatgattttcgattccgccgacggtgcagcagctgctgcacctgcgcaggaagagaagaaagccgctccggccgccgctgctccagcagctgccgcgagcgcgaaagaagtgaacgtgcctgacatcggcggtgacgaagttgaagtcactgagatcctggtgaaagtgggcgataccgttgcggccgagcagtcactgatcaccgtagaaggcgataaagcctctatggaagtgccagcaccgtttgcgggtaccgttaaagagatcaagatcaacaccggcgacaaagtgtctaccggttctctgatcatgatcttcgaagtggcaggtgctgcacctgctgccgcgcctgcacaggccgctgctccggcttcggccgctgcaccagccgctgctggcggcgcgaaagacgttaacgtaccggacatcggcggtgacgaagttgaagtgaccgaagtgatggtgaaagtgggcgacaaagttgccgctgaacagtcactgatcaccgttgaaggcgacaaggcctccatggaagtgcctgcgccgttcgcgggtaccgttaaagagatcaaaatcagcaccggcgacaaagtgtctaccggctctctgatcatggtcttcgaagtggaaggcgctgcgcctgccgcagctccggctgccgcggctgctccagcaccggctgctgcaccggctcaggctgctaaaccagccgctgcccctgctgcaaaagcagaaaaatcagagttcgctgaaaacgacgcttacgtccacgcgacgccgctgattcgtcgcctggcgcgcgaattcggtgtgaacctggcgaaagtgaaagggactggccgtaaaggtcgtatcctgcgcgaagacgttcagacctacgtgaaagacgcggtgaaacgcgccgaagctgcaccagctgcagccgctggcggcggtatcccgggcatgctgccatggccgaaagtggacttcagcaagttcggcgaaatcgaagaagtggagctgggccgtatccagaaaatctctggtgcgaacctgagccgtaactgggtgatgatcccgcacgttacgcacttcgataagaccgatatcaccgatctggaagcgttccgtaaacagcagaacgccgaagctgagaagcgtaaactggacgtgaaattcaccccagtggtcttcatcatgaaggcggttgctgcggctctggaacagatgccacgcttcaacagctccctgtccgaagacggccagaagctgacgctgaagaaatacatcaacatcggtgttgcggttgatacgccaaatggtctggttgttccggtcttcaaagacgtgaacaagaagagcatcactgagctgtcccgtgaactgaccaccatctccaagaaagcgcgtgatggtaagctgactgccggcgaaatgcagggcggctgcttcaccatctccagcatcggcggcctgggtaccacccacttcgcgccgattgtgaacgcgccggaagtggctatcctcggtgtgtccaagtccgcgatggagccggtgtggaatggcaaagagttcgtgccgcgtctgatgatgccaatctctctgtccttcgaccaccgcgtgatcgacggtgctgatggtgcgcgtttcatcaccatcatcaacaacatgctgagcgacattcgccgcctggtgatgtaatcgaaaagccggccagtcggccggcttttttctgataatctcatggcgtttgtgaggttattggcgaaagcgacaattcgtgagccgtttgttgtttcaaaattgttaacaattttgtaaactgcgggcggatagaacgacccggtggacgacgggtataaactaagaggtcatgatgagcacagaaatcaaaactcaggtcgtagtacttggggcaggcccggcaggttactccgcagcatttcgcgcagcggatttaggtctggaaaccgtcatcgtagaacgttacagcaccctcggcggtgtttgtctgaacgtcggctgtatcccttctaaagcgctgctgcacgtagcgaaagttatcgaagaagccaaagcgctggctgaacacggtatcgtcttcggcgagccgaaaaccgacatcgataaaattcgtacctggaaagagaaagttatcactcagctgaccggcggtctggcgggtatggccaaaggccgtaaagtgaaagtggtaaacggtctgggtaaattcaccggtgcgaacaccctggaagtggaaggcgaaaacggcaaaaccgtgatcaacttcgacaacgcgatcatcgcggcaggctctcgcccaatcgaactgccattcattccacatgaagatccgcgcgtgtgggattccaccgatgcgctggagctgaaaaccgttcctaagcgtctgctggtgatgggcggcggtatcatcggtctggaaatgggtaccgtgtaccacgcgctgggttcagagatcgacgtggttgaaatgttcgaccaggttatcccggctgctgacaaagacatcgttaaagtcttcaccaagcgcatcagcaagaaattcaacctgatgctggaaaccaaagtgactgccgttgaagcgaaagaagacggtatttacgtttccatggaaggcaaaaaagccccatccgaaccacagcgttacgacgccgtgctggtggcgatcggccgtgtgccgaacggtaagaacctcgacgcgggcaaagctggcgtggaagtggacgaccgtggcttcatccgcgttgacaaacagctgcgcactaacgtgccgcacatctttgctatcggcgatatcgtcggtcagccaatgctggcgcacaaaggtgttcacgaaggtcacgttgccgctgaagttatcgccggcatgaagcactacttcgatccgaaagtgatcccatctatcgcgtataccgagccagaagtggcatgggtgggtctgactgagaaagaagcgaaagagaaaggcatcagctacgaaaccgccaccttcccgtgggctgcttctggccgtgctatcgcgtccgactgcgcagacggtatgaccaaactgatcttcgacaaagagactcaccgcgtaatcggtggtgcgattgtcggtaccaacggcggcgagctgctgggtgaaatcggtctggctatcgaaatgggctgcgacgcggaagacatcgcgctgaccatccacgctcacccaactctgcacgagtccgtgggcctggcggcagaagtgtttgaaggcagcatcaccgacctgccaaacgcgaaagcgaagaagaaataagtttcttcagatgaaaaaaagcggcctgaggccgctttttttatgcgctgcgttcagggagccacgggttgccaggttttatccgggttataggcggttaacgcccgggctttctgctcagaatccttgccgagatcggactgatacaccttgtcgtcctgatttatcacaaagcacatcacgcccgttttaccgtagctgaccggccacgccaccatcgcaaaaccgttattatccggcaggatccggaagcgatagccgtgatagccggtacccggctctttcgggctaaatgccggtccgagcggactgggcgtttcgccgggtgagacgggccagtacaaaccgtctttcttcccttccgagctgacaatcttctgcgcgtatttctggttcatcgcaaagtagctttgctgcgcatcaacataggcatgcagggcttcaatagcggcaagttcgttacgcccgatttcacgggtcaggatctcttcagccccttctttgatatcgaattgccagccggcggcggttttgatcaccgggatgggaagctgccagtcgttgtctccaacaacaaggtgcgccgtatctccttcgacaacggtgttatgacgaactttccagtcgcgcaggaaacgatcgacggcatccggatcaacgccttcgggagggagaaaatcgcgccagttctctccaagcagattgctcatcgcgcgctcattatgctcactaatggcgctggtcagcgcatcggtcgcctggtcgggcgtgctaaaggactgctgcgctatcgccgaggccgaaagcatgaacaacaccattccactgagtagtttacttttcatgtcggttcccttagcgatgtctaaattcacggcgttcagcgcgtccaccagacacctgacggggctgctgctggcgagccgcaagctgcctgctttgcgcaccgcgctgctgctgcgcctgccagttcgcggaacggctgtcgttgccgcttagcgcattggcccggggatgaccgtttcgctgctgcagggcgcgttgctgcgcgggctgtgaaacgcgtttctcctgtctttgggttacagcctgacgattttctcgctgctgcgtggtggtccgcttcgccgtctgcggtttggtgtcgtagccacggtagttgttgcgctgcgaaatttgcttcagctgttcactcgaggcctgacgctgcacatctttcgtgccgtgacgtgccgtttgcgggaaggttttccccgtggatttctccatctggctcagggccgcctgacgctggctatcccggttaaccggtttttgctgcgttgagcttagcccggtcgcagtgctggttgagtggaaacgggtgttgagctggttagtcggatagggcacaccttcccggtaggccgggttatgctgccaggtacggttggcatccgtcagacgctgtccgctgattttattgaagttctcaacgttgatattgatgttgttatcaccgttgcggttatagccgccgtgattatcccagtcaccgtcatggtggtggtcccagtcatcgtcgtcatcccagtcgatattgctgaaaatggcataggttgtggcaacgcccaggctgaagcctaagccgttgacgaagctgttgccaaactgctctccgggcgtgggcgggagataggtgggtggataggcggtgttgggccaggtcccgtaaaccgtattggggttataggtgggaacataaacgacctgcggatcggcagattcaattttgatcaccgttggggcgggcgcagacgtggttgttgtcgttgcctcggtggcgcgggttttcgctggtgctggctttgtcacggtggtgaccgtctgctgaggcgtagattgtaaagcaccggtcttctgtgcgagcgcgcgcaggcgttgaacggaatccatcacgtctttcggctgtgcgagaaacgcatcgcccagattttgtacccacggcgggttttcacccatcagcgacataagctgaggaaacgcgaccagcgattttacgctcggatcccagggctggctggcaacggcctgaatggcggcgtccccttccattttagggttgtcttttgaccactgagccgcctgaatcacgttggccgggtaagtcgaggccatcagaatttgtgaaagcagggcgtcagggtagagcgcaatgggggcaacccactgatcgatttgcgcggcagtgtaggtcggcgcgtccacaggggcgggctgggctacggcaggtgccgccggttgttgagcgacgggggctggcgcaacgggttccgttgcacgacttttgacaaacaagacgcctgaggcggcaagcagcccggcactgcacagaaggatgagcagatgtggcttaaagggcaacttcataaaatgactccaacgagaccagcgctgtgccgtgaggcgttacggttggcgtgagtattattcacccgtcttttactgttttgacttttattgggaagcgtccggtacgtccggataaagagtgtgagtatttattacacaattatatctgatgaagaaaaaactgaagcgtcacggtgcagaagaaccgcaaaatgatgccctaaatccccgctacaccatgcttaacgattcagcaaactttttaatgttgcttttttgtaaacggattaacactgtgcagaaatcctgctatgctgcccgacgcggtatcgggcatttaccctacaaactgctgtctcacaggagcgtgaagagaacgcccgccgcatatgacaatgagagcgaggagaaccgtcgtgctagaagaataccgtaagcacgtagcagaacgtgccgccgagggaattgtacccaaaccgttagatgcaacccaaatggccgcgctcgtcgagctgctgaagaacccgcctaagggcgaagaagaattcctgttagatctgctgatcaaccgcgtaccgcctggcgtagatgaagctgcctacgtaaaagccggattccttgctgctatcgccaaaggcgaagccacctctccactggttactcctgaaaaagccatcgaactgctcggcaccatgcagggtggttacaacattcatccgctgattgacgcgctggataacgacaagctggcaccgattgccgctaaagcgctctcgtctacgctgctgatgttcgataacttctacgatgtggaagaaaaagccaaagctggcaacgtctatgcgaaacaggtgatgcagtcctgggccgatgccgaatggttcctgaatcgtccagcgctggctgaaaaaattaccgttactgttttcaaagtgaccggtgaaaccaacaccgatgacctctctccggcaccggacgcgtggtctcgcccggatatcccgctgcacgccctggcgatgctgaaaaacgcccgtgaaggcattgagccggatcagccgggcgttgtcggcccgatcaaacagatcgaagcgttgcagaaaaaaggcttcccgctggcttacgtcggtgacgttgtgggtaccggctcttcccgtaagtctgccaccaactccgtgctgtggtttatgggtgacgacattccgcacgtgccaaacaagcgcggcggcggcctgtgcctcggcggcaaaattgcgccaatcttctttaacaccatggaagatgcgggcgcactgccgatcgaagtggacgtctccaacctgaacatgggcgacgtgattgacgtctacccgtacaaaggcgaagtccgtaaccacgacaccaacgagctgctggcaagcttcgagctgaaaaccgacgtgctgattgacgaagtgcgcgccggtggccgtattccgctgatcatcggccgcggcctgaccaccaaagcgcgtgaagcactgggtctgccgcacagtgatgtattccgtcacgcgaaagacgttgcggaaagcaaccgcggcttctcgctggcacagaaaatggtgggtcgcgcctgcggcgtcgccggtatccgtcctggcgcctactgcgagccgaagatgacctccgtaggctctcaggacaccactggcccaatgacccgtgacgaactgaaagacctggcgtgcctgggcttctcttccgatctggtgatgcagtccttctgccacactgcggcgtatccgaagccggttgacgtgaccacgcaccacacactgcctgacttcattatgaaccgtggcggtgtctccctgcgtccgggcgacggcgttatccactcctggctgaaccgcatgctgctgccggataccgtgggtaccggcggtgactcccatacccgtttcccaatcggtatctccttcccggcgggctccggtctggtggcgtttgctgccgcgaccggcgtgatgccgctggatatgccggaatcggtgctggtgcgcttcaaaggtaaaatgcagccgggtatcaccctgcgcgacctggttcacgcgatcccgctgtatgcgattaaacagggtctgctgaccgttgaaaagaaagggaagaaaaacatcttctctggccgcattctggaaatcgaaggtctgccggatctgaaagtagagcaggcgttcgagctgaccgatgcctccgccgagcgttcggctgcgggctgtaccatcaagctgaacaaagagccgatcgttgagtacctgaactctaacatcgtgctgctgaagtggatgattgcagaaggctacggcgaccgtcgtacgctggagcgtcgtatccagggcatggaaaaatggctggccgatccgcagctgctggaagccgatgctgacgcagagtacgcggcggtgatcgacatcgatctggcggatatcaaagagccaatcctgtgtgcaccgaacgatccggacgacgcgcgtccgctgtctgaggtccagggcgagaagatcgatgaagtgttcattggttcgtgcatgaccaacatcggtcacttccgcgcggccggtaagctgctggatacccacaaaggccagctgccaacccgtctgtgggtggcgccgccaacccgtatggacgcggctcagctgaccgaagagggctactacagcgtgtttggtaagagcggtgcgcgtatcgaaattcctggctgttccctgtgtatgggtaaccaggcgcgcgtcgccgacggcgcgacggtggtctccacctcgacccgtaacttcccgaaccgtttaggtaccggtgcgaacgtcttcctggcctctgcggagctggcggcggttgcggcgctgattggcaaactgccaacgccggaagagtaccagacctttgtggcgcaggtggataagaccgcggtggatacctatcgctacctgaacttcgatcagctctctcagtacaccgagaaggcagacggggtgatcttccagacggcagtataaatgctaccctctcccgtgggagaggggctgggggtgagggcaccagaccgcacctgacccattgcccggtggcgctacgctaaccgggcctacaaaacccatcgcaactacggtgggttttttattttcattcctcccacctcccacgctttttttcttcctcgctgctgcgataattaccttaatggctttgcagaggaaaacactatggattacgaatttctgcgcgacatcaccggagtggtgaaagtgcgtatgtcgatgggccacgaagccgttggacactggtttaacgaagaggtgaaagaaaatctctcccttcttgatgaggttgaacaggcggcaaagacggtgaaaggcagtgagcgctcctggcaacgcgccgggcacgaatacacgctgtggatggacggtgaagaggtcatggtgcgtgccaaccagctcgagttttcaggcgacgagatggaagaggggatgagctactatgacgaagaaagcctgtcgctgtgcggcgtagaagacttccttcaggtggtgaatgcctaccgcgagttcatgaaacagcggtaatttcccgaagcatccctgctccgggcaacacttacacggccggaatgttgcggccgtagtagatctcgcgcatctctttccagagcaggtcagtaatcgccttacgctcttcttcgcttaaatcttccggcttcgtgtggaacatatagtgcttaaggtcgaactccttaagtaacatcttggtatggaagatgttttcctgatacacgttcacgtccatcatgtcgtacagcgacttcatgtcctcggacataaagttctgaatagagttgatctcgtggtcgatgaagtgcttcatgccgttgacgtcacgggtaaaaccgcgcacgcggtaatcaatcgtgacgatatccgattccagctggtggatgagatagttcagtgcgttcagtggggaaatcacgccgcaggtcgacacttcaatatcggcgcggaacgtacacagcccgccttccgggtgactctccgggtaggtatggacgcagatatggcttttatccaggtgagcaaccaccacttccggcagcgggcccggatgttccgttttgtcgataagcttcggatcgaccggctcttcgctgaccagtatggtcacgctggcgccctggggttcataatcctgtcgggcaatattcaggatgttggcgccgataatggaacaggtttctgacaggatctcggtcagacggttggcgttgtagagttcgtcgatataggcgatgtaaccatcgcgttcttccgctgttttggcatagcagatatcgtaaatacaaaaactcaggcttttggtcagattgttaaagccatgcagtttaagctttttcaattagctcacccccttagtggataatgcgtcttgcaggtactgcggcagagcaaacgctgcggtatgaatagccggattgtagtatcggcactgtagacctgcctgatggaagcgggcctgaataatttcggtggaaagatgacgtaatacgtcgttatccgtcgcccaggcaaaggtcatgatcccgccgtagtacgtcggaatggccgcctgatagaagctgacatcctcgaaataggtgctgagcttgcgatggctatccagcgcttcatcctgttgcaggaagcagacgccgttttgggcgacgaagatcccgcccgggttcaggcaacgcttgcagccttcgtagaacgaggaggtaaacagcgacgcgccagggccgatagggtcggtgcagtcggagataatgacgtcaaaggtctgggttgtctggttaacaaagttaaccccgtcatcaatcaccagattaaaacgcggatcgtcatagctaccggcattgtggttgggcaggtactggcggcagaacgagacgacgcccgcatcgatttccaccatggtgatggtttcaatcgagcgatggcgggaaacctcgcgcagcattgcaccgtcgccaccgccgataatcaggacatgctttgcatggccgtgcgccagcagcgggacgtgggtcatcatctcatgatagataaactcatctcgctcggtcgtttgcaccacgccgtccagcgccatcacgcggccaaaggcagcattctcgaagatgatgagatcctggtgatcggttttttcatgatagagcacgttatcaacggcaaagtactgaccaaactggtcatgcagtgtttcatgccacaacgtgtggtcggccatacgcggactcctcctttgttaacatccgttacgctcacaaaaaatgagcgaaacatgatagctaactataaccgtggttgcacggctataggtttaacaggaggcgtcgggaaggttatttgacgtaggcgagcaggctgagcgaatcgcgagccagcgctttgcattttttagccgtgggaatgccaataccgcttaggtcacggtagctgtcttcgccgagcgccttcatgtcaaagctgtcgtagttgctgagatcccactggttctgctgggcaaaaaagaccagcgcgcggcgaatttgcccgttgggtaaattctggtagccacaatcatttttcaggaatacaaaaaccgccgttaaatcggccatatcttccgcttcattttcactgagcgcatagctgttcgcacacattgccatcaggctaccgaacaaaattgtcctgaaaaacgtcttcattgcttctaccacttcttcacggaaaattaacgttagcatacttgatgccagtgcgacgatctttattattgccgctttacttgaccttccggtaaggggagggtttatgctcaaaagatcgcctgctggaaataaggaaatgaacatgcaacgtcgtgattttttaaaatattccgtggcgctgggggctgccagcgccttacccctctggagccgtgcggttttcgcggctgacaggcctgccttacccatccctgatttgctgaccgctgacgcccgcagccgtatccagcttgtcgttcagtccggtaacacgctgttcggtgcgcacaacgcgacaacctggggctataacggcaatcttctcggtcctgcgctacagctgcgcaaaggtaaagcggtgacggtggatatccacaatacgcttgctgaagagacgacggtgcactggcacggactggaagtgccgggcgaggtagacggcgggccgcagggcatcatcaaagcgggcggcacgcgcagcgtcacctttacgcccaaccagcgcgccgcgacctgctggttccatccgcatcagcatggcaaaacgggccatcaggtagccatggggctggcggggctggtgctgattgaagacgacgaaagccgcctgctgcgcctgccgaagcagtggggcatcgacgatgtgccggtgattgtgcaggacaagaaattcaccgctgacgggcaaatcgactaccagctggatgtgatgagcgcggcggtcggctggtttggcgacacgctgctgaccaacggcgccatttatcctcagcacgccgcgccgaaaggctggctgcgcctgcgtctgcttaacggctgtaacgcgcgttccctcaacttcgccaccagcgataagcgtccgctgtacgtggtcgccagcgacggcgggctgctgcctgagccggtgaaggtcaacgaactgccgatgctgatgggggagcgctttgaggtgctggtggatatcagcgacggcaagccgttcgatcttgtgaccctgccggttagccagatggggatggcggtcgcgccgtttgacaagccgcatccggtgctgcgtatccagccgttacgggtgaccgcttccggcacgctgcctgatacgttaaccacgctgccggcacttccgtcgcttgatgggcttacgcaacggaaactgcagctctccatgaacccgatgctcgatatgatgggcatgcaggcgctgatggcgaaatatggcgataaggcgatggcggggatgcatcacgggcagatgaggggtcacatgaacatggaccacggcaacatgggcggcatggggaacatgaatcacggcgaccatggctttgatttccacaacgccaacatgatcaacggcaaagcgttcgatatgaacacgccgatgtttgctgcgacaaaagggcagcttgagcgctgggtgatttcaggtgaaggggacatgatgctgcacccgttccacatccacggcacgcagttccgcattctctctgagaacggcaaagccccggacgcgcatcgcgcgggctggaaggatacggtgaaggtggaaggcggcgtcagcgaggtgctggtgaagtttgaccacgatgcgccgaaggagtttgcctacatggcgcactgccatctgctggagcatgaagatacggggatgatgctgggctttaccgtataaaaaaaaaccgggtggcggcttcgccttacccggccgacatagcgtatccataggcccggtaagcgtaagcgccaccgggcttttcagttacttgttttcgtcaggcagtgcatacgcgacaatatagtcgcccatcttcgtgccaaacgaaccgtgaccacccgcggagatgacaacgtactgcttgccattcacttcataggtcatcggcgtagcttgtccacccgctggcagacggccttgccacagtttttcaccgttggtcatgttgtacgcgcgcaggtagttatctgcggttgccgcgatgaacagcacgttaccggcggtggagattgggccacccagcattggcatacccatattgaacggcaccggaaccggcatcgggaacggcatgctgtcctgtggcgtaccaatacgttttttccatacgatctggttagttttcagatccagaccggagatataaccccaggcaggctgtttacacggcagaccgaacggcgacaggaacggattcagcgttacgccgaacggtacgccgtactgcggctgaatgccggcttcggtaccgctgcctttcgcgtctttcggctgctccattgggttgcccggaccgcgtgggatcagacgggaaacgaacggcagcgccattgggttggcaatcgcgacctgacggttagggtcaacggagatcccaccccactcgaacatccccaggttacccgggaagaccagcgtgccctgttcagaaggcggcgtgaagatgccttcatagcgcagctgatggaacatcacgcggcacaccagctggtcaaacatcgtggcaccccacatgtctgccccgctgaggtctttcttcggacggaagctcagatcggagaacggctgggttttgctgacgtaatcgcctttcgccgcaccctgcggaaccggtttttccggtgcaggcacaaccagcttgccgttgctgcgatccagcacgaagatgttgccggttttcgctggagcgtaaatcaccggtacggttttgccatcaacggtgatgtccgccagcgtcggctgggacggcatatccatatcccacagatcgtggtgaacggtctggtagctccaggccagcttaccggtggtcgcgttcaatgccacgatagcgctggcataacgttcctgctccggcgtgcggttaccgccccagatatctggcgtagtaacgcccatcggcaggtagaccaggtccagcttcgcgtcatacgccgctggcgcccaggagtttggcgagttaaaggtaaaggtgtgttcgtccgacgggatcgcgttcggatctttcgcgcccgggtcgaaggcccacagcagtttaccggtgttcacgtcgaaaccacggataacgccggaggtttcgcgggtggagaagttatctgttaccgaaccggcaatcacgatggttttatcggtgatgatgggcggggaggtcggctcatacagaccaggcgtggtgtccggcatattggtctgcagattcaggatacctttgttggcaaaggtttcgcacagcttgcccgtttcggcattgatggcgaacagacgaccatcgttcaccggcagcatgatgcggcgaggacagtcggcaatgacttccgggctcgcattatccgggcgcgcttcgtgataagagacgccacggcaggtcacgtgctggaaggacgggttggagttcagctgcggatcgaagtgccatttctctttaccggtggccgcgtcgagcgcgaacagacgctggtgcgccgtacacagataaagcatatcgccgactttaattggcgtcacttcgttggtcagttcacccggatcgttcggcatcttcagatcgccggtacggaatacccaggcttctttcaggtttttaacgttgtccgcgttgatctgcttcagcggagagtagcgctgaccttcctggttacggccataggcaggccagtcgccgtcagcaacctgagagatcgccgccgcaggtgtcgattctgcgttcagcgtcccgttgatctcctgcggatcgttgaagccagcccaggtcaggataccgccgctgattaacagcgctaccaccagcgccgcgaccgcaccgctggacggcacgatcaggcgacgccagacgaacggcaggatcagccagatgccgaagaagaccaggatgtcactgcgcggcgtcagcgcccagaaatcaaagccgacttcccagacgccccagatcatggtggcaagaaggagtgcggcatacagccacagtgcagattgttttctacgccagagcaggacggttacgccaagcataaccaggcccgcaatcgggtagtaccaggagccgccgatcgcgaccaaccagacgccaccgattaacaggtacaggccgcagaaggcggcgaatagcgctgttaatgtcaccagtagacgcggctgtttagagtttgtttcagccatagaaagtgtactcgtcagtttttgttaataatttgctagcaactaattataggtattaacaagtgtgatcggaatcacaatatttgctttttataactcatacgccagggttatccatttgctgatataatggctggcttgcgtatcagtgctggatattaacgcatccgtattgagagattttcattaaaatcatttggttagtaatatgaaacatactgttgaagcaaaaaacttcgtgtttgcatgcttttaggtgatttcatgttttctatattttgatttttattatcagtaagatacgatgttttatgttcgtatgtttatgcgattttttcgactgtagcaacgaacggtgtatcaatcggtgtatcaatcgtattcacgaatccaagtagggcgggctatggcgggcactaacaagctaagtgataaaaagctcaaggcactccagggggccagccgtaatgcgccagaaatgtatgctgatggtgaaggtttaagcgtcagggcatcaaaacaaggccaattaagctgggtgttttcgtaccggttgggcggaaggggtagcaaactcgaacgtttaacgcttggccgttacccggatttgtcgctaaaagctgcgagagaaaagcgggaaaagtgccgtcaatggctggctggtggtcttgatccaaaaacagagcttgagctgagcaccgaagaaacgctcaagcctgtgacagtacaggatactctcgagtactggttagtgaattacgccaggagaaagcgaagcgacgaggaactggtaagggcacagctacgtaagcatatttacccgcggcttggccgttatccaatcgcgagatgtgaaacccgtcattgggtggcctgttttgatgaaataaaccagactaaacccatgaccgccggtcgcatgtttcagatttccaaacaggcgttacgtttctgcaaagttcgccgctatgctgccagtgatgccttggtatttctcaccattcaggatgtaggccagccatccggccagcgtgaccgcgtattgtcagatagtgaactggctgatgtatggcgctgtgcagacagcgatgaccagcagccgtattattcacgtattcttaaaatgttggtgctctttggtgcgcgaacgatggaggttcgcctttctcgatggtcagaatgggattttacctcgtggatttggacagtaccgaaagagcacagcaaaactcgcgagaaaatcgtgagatcgataccagaagctatacggccgtggctggaagagttaaagcgcgatacagggaaaacaggcttgttattgggagaagatcgtacccgtcaggctgtatcattgaaagggcgcaggctttttaaagattttcaccataacgagccgtggacgttgcatgatttacgccgcacgttctccacagggctgaacaatatgggtatagcaccgcacatagtcgagctgctgctgggccatgccttgccgggagtcatggcgatttataaccgtagtctgtatttgcctgagaagctggatgcgctgaataaatggcatgaacgcttagagcttcttgcgggtaatcatcaaaatgtggtgctgttacctgtagctaatagagattaaactgatattgcgggtctaggtcggccaaccgaaaagcgggaaaccctacccgtctggctcgcaaagtatttagggcgttgagggtagcgcaatggctaacgacattaaaattccttttcaatattgcaatattgagcgtgcgtcaagattgctgggttgcgagattagcgatctgattaatttgggtgttactaaaaaaatagctttatgcctcaatttatttgatgctcgcgctgttttatatatgaaaactgatagcaagtctgcaagcgcttggttcgataccagaaaggcaaactccaccacatccatgatggggaataatattactgaattttccaggcttcatcttttcagatacgattataacgaggaagcagatgaaactattcacgtgcctttatttggtcaagactcagaaaatggatgcttcagttcgattggtaaagcttatgggttgtggcgtctttggggaggtctagaagaactacaaaattttggagagtacgccataagtggttttgaattaactccttgccatcccgaaaaagataatcccgccgtacagcttttaatggttggcgaagatagcgattatgatgaagaagacgatcaagtcttcaaaaataaaatctctataaatgacttgtggattaccgctcaggatataaggcgacttcttgactgtggtggagattatttcacgctaacagatgattttgagtctgtagagcctcataagatgaatggcaatgaaattgtgcatcattctgctgaaagacatgcaagaaaccgagagcaaattttaatggttgccatgcgctttaaagaagagcagcaaaatgcttttaatgagagctgcagaaaaacagatggaactattaactattctgcttgggcgcgtgagttgatcgccagacctgactggttcatcaatggtgaattgccaataaaaacagaaacgaaaatagcagcaatattaaacaatgcacataagaggccgagcgaaagaacacagtaagccttactcatatactcctaagcatactgatatatttataagcattatcagtatgtttctatgcttacaactgtgttttcatccagtatcaaaggttgcaaactagcctccacaaacttagaaacagtggaggcaacatgcaaaacatcacctttaccccgcccaatccagaacagcgccgcacccttttggaagagtacggctttaagttcgaccgtcgaattcgtgaagaagaatgcagcgaaatcaccagcctttcccgttccagtcgctggaagatggaacagcaggggcgcttcccaccgcgctgtcactttggccgcaatagttgtgcctggcttctttctgatgtgctctggtgggttcgcaatccgcctgcagtagagaacgtcaataacccatacagccgcaaatctgcttaattaactacaggtaaacgaatatggaaaaaataactgccttggctggcagcggccaaactcaacccgaaaccagccagaaagatatttccagcgataattttgctgcgcgaatccctgtaaccatgagcaagattggcgggaaagaaacccagtctgtaagcggccgtatgcttcatacgtttctggttgtagggcgtgactttaccaactggatcaaagggcgcattaagcagtatgggttcgttgaaggggttgattatatgattgtcgaatatttgacctcgccaaaacgggcgagctcaaaatctcgccagcgtatcgagcatgactacattgtcagcctgaatatggctaaagagctttctatggttgagcgcaacgcgcaaggcaagatggcccgccagtatttcatcgactgtgaagaacgtctgcgccgcgtagcgccagaggaacatgaggcggcgttattgggttggcgtaaaaatcgcgtggctgcctgcgaagatcataagagtatggccgatgcaatgaagggctacatcgagcgctccggcgacaggcagcacggctttgcctacagcaatgaatgctcgttcctgaatagccttgtgctgggtatgcacccgcgagtgtgggcgaaacagaaagaaattccggttaagcaggtacgtgaccatatgaacgccgatcagctggcgttgctggcttatctggaaagccgtgattgtgctctgttggatcttgatacccgtacagcaatccgcaagacgaaactcacagaactggcgcagcgctggctggttaagcgtgttggaggtgcagagtgattttgcataactcaatcagggttgcgcagaatttgctccgacgaaattcgcacgcgcaaaccaaactcggtgatatgccgagtttaaacaactacgtacgtttaacgtccggacatcgcaacccattgaatcaaattgattataacgaaccgttagaattggcgggcaacaaacacgaacagtattcgggttggcttgaacatcaacattgcttaggttcagaggttccgacgaataacgtagagagctgcgagtataaccaaccctctttaagagggtcagttcacagcattacggggagtaaccctgttcagctttccgattcagatctggctttcttgcgctgctcagatttgagtttccggccgcaggcatccagaacccaagcagagaaattagcgccggagttatctgctttctctcgctctacgctggcatcaatctcttcaataagttcgtgcggaaatcgtatctttttctgtgctgatttagcgtttactgccttagtagccatttaccctcctgcgtatagtgagggtacaccatatcagaaaaatagcttgacgtgtacccccaccaaaaatatagtgggggtacaccttgaggttgaagatactcaagatacagcgaagcccggcagtgttaccagcactaaccgggcctctgaccacaacgtaactgaggcttacatcatggcttgtatacagcatacccaaactcgccccaaatatcagtatcgttttctcgctctgagcgctatcgggcgcaacgtcattcacatcaccgctaccactgagcgcgaagcccgtgagcaatcaccggctggatgcgtaatggtgttcgctggccgtttgcctgttgaaggtatggttatacccaccccacctttcatccattgtgaatatcgcaacacttcaaccgtagagaaaacctctatggaggtgagccatgcgtgagccaatctgtctggagcaggccgaatataaatcagcgctggcctcatcactttacgaaaccattctggagaaggcctctgctgaatgttcagaaacgctgctgaatctgatttctattgcgtgtgattttaatcaggaaatccaccgggcattaatcgccgagctgcgcatgggagagacgaaatgagacaggttccttttgaagtcctgatgcacgctgaaaatgcactttcagagagtgagtgcgcaatgtctgtactgagcatgtggattgacagcattcccgacggtgacgaacaccgtgaagaagcctgccgtgtcggcgcaattatgtctctgctgcataaatctatcggcgagctggtgaaagcgcgggaggcttacagtgcaaaatgactttgtaagcgatgtgcgcagtaaggcaaatggctactggccgtcaatactggaacgcctggcgattccgacgaatcgcggtgaggggccgtgtccggcttgcggcggcaaaacccgctaccggttcgacaataaagataaccggggaacgtatttctgttcgcactgtggcgcgggtaccgggctggatctggtgatgaaggtcaatcagtgcggtgcgagagaagcggctgagctggtggccgaagcgatggcgctgcctatgccggaaccgaagccagccagagagaaacctcaaacggatatcgccgggaaagttgcggcgctggtcgcgaaagcctctccggggcagtctgcttaccttgcatcaaaggggcttcaatgccccttcccgatgctgtccgatggatcgctgctgctggtgctgaaaaacggcgctggcgcaacaacaggcgcacaggtgattaagccagatggcaataagcgactggtggccggaacggtgaagaaaggctctttttgcgtggttaattccggtgaaacgccggagacggtgattattgccgaaggactggcaacggcgctttcggttcagcagttccgccctgatgcgacaattatcgcagcgattgacgccgggaacctgctgccagttgcgcaggtgatacgacagcgttacccggatgcgcagatcatcatcgccgctgataacgatattaagcctggcgaaccaaacacgggtaaatcagccgcagaaaaagccgctaaagctgtctctggccgggtggctttacctcagtctgaggaaaaggccgactggaatgattttcaccagcaatacgggctggaagaagccgcagcagcatttaatgattcgatgtaccagccggagggcgaaaaggtggtggtaaaacttaagtctattgacggcggtaaaaaagagcaaaaatcagcgctgcaaggtgacgaactgaaaccacgcgtggagagtcgtaacgatggcttgtactggattacgccaaaggtggacaaggacagcggcgaaatcattaataacgaaacttggctttgctcgcctcttgaggtagttggatcaggtagtgacggggcagaacgctaccttgttttgcgctggcgttcgccgcgtggacacgaagatattaccagggcgatcccttgcgctgatgttggagagcgtgaaggctggcgctcacttaaagctggaggggttaacgtgaccactaaaagcacctttcgtgccattctggccgactggctgcagcagtgcggatctggtcaggaatggattatcactcataccaccggctggcatcatggggcatatatcatgcctgatggcgaagttattggtgatccagagacacccattctctttaatggtcgcagcgcggcatcttccggttatgccgtttctggtactgctgagggttggcgggattcggtggcttatctggccggcggcaacccatcaatgatgctgggagtggcggcggcattatccgcgccgctaattgggctggtgggtgctgatggtttcggtgtccacttgttcgagcagtcgagcgccggtaagaccactacagctaatattgcgagcagtctgtggggcgagccggatgctctgcggctcacgtggtacggtactgcgcttggcatcgcaaacgaagcggaggcacataacgacagtctgttaccgctggatgaagtggggcagggtagcagcgccaaagacgttgccacgtcggcatacaccttgtttaacggtgctggaaagctgcagggagccaaagagggcggcaatcgggagttgaaacgctggcgcactgtagcaatcagtaccggggaaatggatattgagacgtttctttctgctggtgggctaaaagttaaggcaggccagctggttcgcctgctgaatatccccatggagaaatcgacggcctttcatggcctgcagaatggcaaggctcatgctgatgcactgaaacaggcatggattgaaaatcacggtgcagcgggccgagagtgggttaaatggttggcagctcaccagaaggaagctaaacaggctgtgcatgacgcccagacgcgctggcgcggactcattccggctgattatggcgagcaggtacaccgcgtagcagaacgttttgcaatccttgaagctgcgctggtaactggtgcatcgatcaccggatgggacgaacaggccagccgtgatgctatccagcatagctttaatgcctgggtgaaagagttcggcacgggtaacaaagagcaccagcagatcatcgagcagtgcgaggcgtttcttaatgcttatggtctgagccggttcgcccccttgccttatgatcctgcaagcctgcctatcagtaatcttgccgggtatcgcaagcgcaagagcaaccatgatgatgcgcccatggtgttctatacattccctgcaacttttgagaaggagattgctcatggctttaatgccaggcagtttgcccgtgcgcttgccgctgccggtttgctctctgagccatcaagtgggagaggatatcaacagaaatcaccgcgtattgatgggcgtcaaatcaacgtttatgtacttcaacaagttgcagaagaaggagaggaataaaatacacatgtgagggctgttattgttggttcagttggttcaatgattgttaattacattcatgttattgttttatatagtttttatgcctaataattgaaccaacactgaaccaacaagcggctattttgaaccaacatattacgctattgaaccaacaccttttctggctggcctgtaaatatttgccactgaaccaacacgaaaatagcgtttgttggttcaaaacagggctttgttggttcactaaaagaaaaataatccttataaaacaacgctatttacaaattgaaccaactgaactgactgaaccaacatagttttgtatctatacacaaaaaatagaggatgttatggacaaaaaaagcagtgatgacctggtatattcgaaagtgctgatccagaaactggttgagcacaaagatatgtttggggttccagacagcaaaacggatttgcagcttatgccgcttagcgaatatcgggaactggtaaagcgagaggcttacttttttgtggatcacaatggctttctgcgccatcaattctctggtgatgttatggccgcgagtaaagagcagctggatatccttatcggcgaactgaaagcgaagcgtgagctgcttgatgatgctctggattgcgctaaggaataattttgtaaattattcgtactcatgtttacccgtgattacccctgtctctgacgggggttttctttatatttttcatgtatatcttgaagagtggcactcagacgtgagccgccactggccgttaagtcaagctgtagcgagtacagcctgcgagaggcagaaaaagatttaacggcctcccctccaagcgctggtttcacgtctctacgttaattgatacggaaaccactccatgaagaaactactcgaattacgccagcagaaagccgcactcaaaacccagatgcgttccatgctggataaagccgacaccgaaaagcgcagcctgaacgaagaagagggcaaaaagttcgatgaactccgcgcccaggctgatgccctcgaagttgaaatcacccgtcttgaagccgtcgccgacgatcagcgcaatctgcctggtacttccgttgaaggtgagccagtaagcaacgacgagctgcgccactacatcatgacaggtgatacgcgctctctctccacgctggtgcaggctgacggcggttataccgttatccctgagctggacaaagagatcatgcgccagttgcaggatgatagcgtgatgcgctccatcgcaacggtgaagacgaccaaaaccaacgaataccagaagctggtatctgtgggcggcactaccgttaatcgcggtaccgaaggtgaggcacgtaccgaaaccagtacgccgaagatggagcgcgttgatatcaaactcaacccgatctacgcctacccgaaaaccactcaggagattctcgacttctccgaggtggatattctgggctggctgtcttctgaaattgccgacaccttcaccgccaccgaagaaagcgactttgtgaacggcgacggtgacaaaaaatccaaaggcttcctgtcttaccctcgcgcggccactgccgacaaaacccgtccgttcggtacgctggagaagatggaagcggctgacgtttcctctgatggcttgatcgacctgctgtataagctgaaagccaaataccgcaaaaacgcacggttaggggcatagaaaacggctgataagattctttcatatcacccgccacagcacccacccgccaaaccccatcagcaccacccccgccgtgcgctctatcagccacagcgcacggctgagcttctgttgcaccgacgatagccccatcagcgacaccagcaccagatcccacgtcagcaccaccatcaccatccagacgccgcaggtcgcctgctgaagcagcgtgacgtccggcccaagtagcgccgtcattagcgccagataaaacagcgcattcttcgggttaagcagcgccgagccgagccccagcaggatctgcttgcgcagcgagggacagcgctgacggggttcattcagtgccagtgcctgcggttggcttcgcaccagatgcgagccgatccacagcaggtacagtgcgccggataactctatgagcgtaaacagccagccaaactggcgcaacgcactccagccgataatcaccagaacaatataaagcgcgttacccgcggcgatgccgacgcacaatccggcgctgccgcgcagtcggtagcgcgccgcgtagcccaccagcaggaagaagtccggccccgggcttaacagggcgacaaaatgcgccagcgccagggcgagaaaagcggaagggaagaacagttccatagcaacctcggttaacaatctgaggtcaggctacggtgatgccaacgttatttattgtcagatattgatcggcccgtcgcgtactggcgcggcgtggcggcggtatagctgacgaaggtcttatgaaaatggctctggtcggcaaagccgctctggtagccaacgtcggcgatgtcgtccccggcacgtagccgtgctttggcgaactccacgcgggagatgttgaggaagctgcccggcgtcaggccggtatcctgccggaaggtgcggatcagcgtctccttgcgcagagagaatcgctgggcaagttcgtcaagcgaaggcggtgcggccaggtcggcaagaaacgcctgccgcacgtgctggctggttgagcgaagcgcatctgcgttttccacgcggcggggcagggctgaaagcagcgtgtccacggatacaggcgacatcatctcaacaatatccaggtagcgcttaaacagcgcagggtcgcgaatcacctgtaacgccagaggaatatcggtgtcgatatagagcatatggtagctgcgcggttgcccggcgacggggttgcagctgtgcggcgcagaggccgggatcacaatgaggtccccggggttaaggatgtattctttgtcatgacaaatgcagcaggtctggccttccataatcgcgccgatagagagctgagggtgactgtggcgtttgtacgcctgcgtgctctgccacgtgctgcgcagctcaaggcctgaggcgcggtgaaaagtctgccggatgtgtcgggtatcggtcatatgaactccttctggacgttttttataccacgtcagcgaaccgtctggcagcgcttcattaagaaccttccggatatacccaactttacgtccacagccagccatgttgactacccttaataccctaagcggtaaaacaaggagattcgacatggcttatcagacagtaaatcctgccactaaccagctcatcaaagaatacccctcgcataccgacgcggatatcgaagcggcgctgaaggcggccgatgcgctttaccattcggactgggcgaaaggcgacatcagccagcgcctgccggtgctgcataagcttgccgatctgatcgacgagcgcaccgaggagctggcgaaaattgccagtcaggagatgggtaagctcatcgaacagagccgtggcgaagtgaagctgtgcgcgcagatcgcccgctactacgccgacaacgcgaagcagttcctggccccggtgaagtatcaatccgaactcggggaagcgtgggtggaacatcaccccatcggcgtgctgatggccgttgggccgtggaacttcccgtattaccagctgatgcgcgttctggcgccaaacctggcggcgggtaaccccgttatcgccaagcatgccagcatcgtgccgcactgcgccgagacctttgcgcacctggtgcgcgaggcgggcgcgccggaaggggcgtggaccaacctgtttatttcgcccgagcaggtggcgaacatcattgccgacgatcgcgtgcagggtgccgcattaaccggctccgaaaaagccggcagcgtggtggccgcgcaggcggcgaagcacatcaagaaatccacccttgaactgggcggtaacgacgtgttcgtggtgctggacgatgcggacctggacaaagccgtcaggattggcgtgaatgcgcggctcaacaacgccgggcaggtctgtaccgcggcgaagcgctttatcctgcatgaaaagattgccgacaccttcctgagcaaattcaccgaggcatttaagcaggtgaagattggcgatccgctcgacgaaagcaccacgctggggccgctgtcgtcgaaagatgctctggaaacgctgaccaaacaggtcaacgaggcggtgaaaaacggcgcgacgctgcactatggcggcaagccggtgcagcgtgaggggagcttcttcgaaccgacgatcctgacgaacatctcgcgcgacaacccggcgtactttgaagagttcttcggcccggtggcgcagatgtacgtagtaaaaaacgacgacgaggcggtcgcgctggcgaacgactcacactacggcctgggtggggcggtattcagccagaatatcgagcgcgcgaaaaaaatggcgtcgcggattgagaccgggatggtgtatatcaactggctcaccgataccgcgccagagctgccgttcggcggcgtgaagcgctccggttacggacgcgagctgtcggatctggggatcaaagagtttgtgaaccagaagctggtggtggtgcgtcagtaagaggtcataaaaaaacctgccagccggcaggtttttttaaggggattattgcacttcgatcttgtcccagccgcttttaaacatgcagctgtcaaccagcgtatcccggcgatattcattcgcgtcttcaaccgtgtagctcgtggaaatatcctttttctttttcgatttgtccgttttttccgagctcgaaccggtcaccacgttatccgggggaagatcgatcagtgcctgcgcttcgcattccgtgagctttttattcatttccgcatcgctgacgcccggtttcacccatttgtactggacgcagccggtgagcatcagcgtgaggctcagaacgcaaagcgcggtcatgcggtgtttcatcagaaggtgactccaccgcctacatatgcgccgtcaatcagcgtgtggccagggcggccgtccttgccatcaacgctcacgtggcggtaacccactttcagggtcacaggcgtaatcggcgtccagcttacgccgccgttggcttccacgtagtttttcacgctgttgttcagcccttctggcgccacgtagccttcaccgtacacgtggatgctgtcggtcagggcaacgttcacaccgccgccgatcgggaacgccacgccgttatcgcctttcttcgggccgatgtagatggctttggcacccgcattcagcatcaccgggcccacttccaggttgtagcctgcgcccacgccgccggtctgggtaccgtcatcggtgtttttaagccagttgctttcggcatacaggccggatgaggatttccccatctcgaggttgaggttggtaaagtttttaccctgctcaatgctgccgcccattgccagagcggaacccgagagggcggtcagagcagaaagaagaaggatattcagttttttcatgttttatgcctcgtcattaaattcatctgggggcaccttaacaagcgatgtttatgactgcaaatgtgatgaaggtcgcggttttatgctgatattgttaacttttttattcgaaatgttgcatcgatgtttgattgtcgaggtgtcaacgcgtgatgttcggacgtttaggcaccgtttaattttttgactaaacataaactgaacgaggaagggatagtgattagaggtgaattaattgggtttctaataatttccagaagtatttcagatgtcacacaatacaacacaaccttacatttcagggcaatgaatatacgttcacccgcgcacgtcggttgcctttctatgtcatttttctgacacgtttattctttacgttgttggcttcactcactggacactaacaatatgaaaagaaaaattattcctgtgcttatcggttgtgcgctctctttctctggcctggctgcgcagcctaccgctgagcgctatatcgtcagcttccctgacggctcccatgtgaaatacagcggcgcgtttgccgatgcgttcccgaacgggctcccggtggggattggctctggcctgctgtttacgggcaagcagggcgatgccctgacgtttgcgaccgtgaccgatcgcggtcccaacgccgatgcgccaaaaatgggtaaaaacgaagccaaaatctttgttacgccggatttcgcgccgctcctgatgaccatccgcgtccagaacggcaaagcggaggcggttgatgcccgcccgctgcatgacgataaaggcgagattaacggtctgccgctgcaaagcggcgtgattggctccaccaatgaagtggcgttcagcgataccctcaagatcctgaaaggtgataaccgcgggctggatacggaaggcatcacgccggacggcaaaggcggctactggctgtgcgacgagtacggcccgttcctgattaacgtcgacagcaaagggaaaatcctcgcgatccacgggccgcaggccgcggaaggggaaaaatctatcgcgggcggtctgccaaacatcatcaaatggcgccagcccaaccggggctttgaaggcctgacccggatgccggacggacgcattatcgccgcagtgcagagcacgctggacatcgacgggaagagcaaaaagcaggcgctgttcacccgtctggtgagcttcgacccggcgaccggcaaaaccgcgatgtacggttaccctatcgacagcgcggcctacgacaaaaacagcgacgccaaaatcggcgacatcgtggcgctcgataatcagcacatcctgctgattgagcagggaagcgataaaaacgacgggatgcgcaacctgatttacaaggtggatctcagcaaggcgagcgatctttccgccttcgacaagccgggcgagtacccggagtttgatgatgagaaaaccctggcgcagcgcggcattacccttgcgacaaaaacgcaggtggtcgatcttcgcgcgctgggctggcagcaggagaaggctgaaggactggcgctgatcgacagcaaaacgcttgcggtggcgaacgataacgattttggcgtgaaggtcgcgatgcaaaacccggtcgagggcaagaagcttaaggattaccgggtgaacgcggaaggcaagctgacgctggaggataaaccggtggaaaccacgctcagcgtgaagccgctgaagaagccggagtccgacagcgagctgtggattgtgacgctgccggaggcggtgaaataagtttaccgctcacccctctccccataggggagaggggattgttcggagcgcatagttaagcggggagtctatctcttcagccccgcaaacgccgcccgaatctcctcttccggcagctggatgcctataaacaccatcacgctgtgcggcgcttcatcgccccacggtcggtcccagtcggcgctgtacaggcgctgcacgccctggaacagcaggcggttcggctcgccgtcaatccacagcatgcctttgtagcgcagcagcctgtcggcaaacgacagcagcaggttctccatcacgcgggagacctcgctgatgtccaccgggtaatccagctccaccacaatcgacgccacgtcgttttgcttgtcggacataaagtggaagcgcggttttgtggtgacgttctcttccagcataaagccgttggtgttgaacagctgagacaggtcgatatcgccgtgcgtcaccgtataaatcggcgcgcgggagttgatgcgcgtcaggcgctcgcgaagcttaacgctttcgcccgccacgtcggttttggtcagcaggatgcggtcggcgtagcccacctgagactgggcgatggtgaactggttcatctgatcgtcggcgtggaccgcatcgaccagggcaatgacgccgtccagcaggtagcgctggcaaaggatctcgtgagagaaaaaggtctgaataatcgggccggggtcggccatgccggtgcactcgatcaccaggcggtcaaagtcgatgtcgccgcggtcgcggctgtcgagcaggtccagcagggcatcttccagctcgttagagcgggtgcagcagatgcagccgttagtcagggttttgatctgcgtggcgcgatcgccaatcagctggtcgtctacggagacttcgccaaattcgttttcgatgacggcgattttgaagccatgctgctcgttcaggatgtggcgcagcagggtggttttaccggcgccgaggaaaccggtcagcagggtaacggcaatcggggtcatggtctctcctttagcagcagcggacgccgccttctccacttccgccgtagcgcgcttcctggcgctcgcggaagaattcggtgtaggtcatgtacggcttatccggatggttggtcttcatgtgctcaacgtagttgtcatagtccgggatgccaatcagcattttcgccgcctgaccgaggtatttttttgcttcgcctaagttaccaaacataacgtgtcctgataagaaaaagcccggtggcgtgcagcgaaccgggcctacagtaccgttgtagggcgggtcagcgcagcgccacccgccattgttttagtggtgtgaagaggtcttcacgccgccttccggtaccggcacgtacggggtttctttatccgtgcggccatcgatgttgcgcactttcatccaggttttgatgccgtagaagatgatgctgtacaccaccaccaggaacagaatgctcagacccgcgttggtgtagttgttcaccacaatatggttcatgttggcaatctgctgcgcggttaaatccgcgccgcctgcagcaatcttctctttgtactggttagccatgaagaagaagccttccagctgcgggttggtgctgaacagcttcagacccagcgcccaggtggtgcagagcagcagccacagcgcaggcaccacggtaacccagatgtatttggtacgtttcatcttcacgaggaccacggtacccagcaccagggccacggccgccagcatctggttagagataccgaacagcggccacaggctcttcacgccgccgagtgggtcaaccacgccctgatacagcaggtaaccccacaggcctacgcagcccgcggtcccgagtacgcccgccaccagagagtcggttttcttcaggaacggcacgaagttacccagcagatcctgcagcatgaagcggcccgcacgggtaccggcatccagcgcggtgaggatgaacagcgcttcgaacagaataccgaagtggtaccagaagcccatgtccgcccacggcagcactttgtggaacacgtgtgcgatacctaccgccagcgtcggtgcaccacctgcgcggttcagcacggacggttcgccgatgtctttcgcggtctgcatgatctgctcaggcgagatcacaaagccccaggagctgacggtcgccgccgcgtgtgcgctggcctctttcagctgcgccatgatcagtgcggtattttcgccgcccatctcatgcaggttaggcatggtgatgcccagacccgctggtggcgtgttcatcgcgaagtacaggccaggctcgataatcgacgccgcaaccagcgccatgatcgccacgaaggactccatcagcattgcgccgtaaccgatgaagcgcgcgtcggtttcattggccatcagcttcggcgtggtgccggaggagatcagcgcgtggaagccagacacggcaccgcaggcgatagtgataaacaggaacgggaacagggcgcctttccacagcggaccggtaccgtcaatgtactgggttaccgccggcattttcagctcagggttgatgatcacaatcccgatggccagcccgacgatcacgccgattttcaggaaggtcgccaagtagtcgcgcggagccagaatcagccacaccggcagcagggcagaaacgaatgcgtaaccgatcagcgcgaaggtgatggtggtgtctttaaaggtcagcgccgggccccagtacgggtcgtgcgcaatcacgccgccgaagtagatggaggcgaccagcagcacgataccgatcaccgagacctcgccaacgcggccagggcgcaggaagcgcatgtagatgcccatgaacagcgcaatcggtacggtagagcagacggtgaagacgccccacggactttcggccagcgctttcaccacgatcagtgccagcaccgcgaggatgatgatcatgatcaggaagcagccaaagagggcgatggtgcccggcacgcggcccatctcttctttgatcatctcacccagcgacgaaccgttacggcgcgaggagataaacagcaccataaagtcctgcaccgcacccgccagcaccacgcccgccagcagccagagcgtacccggcaggtagcccatctgcgcggccagtaccgggccgaccagcgggccagcgcctgcgatggcggcaaagtggtgaccaaacagcacgtagcggttggtaggcacgtagttcaggccgtcattgttaatgaccgccggggtggcacgcgtcgggtcgagcttcatgaccttctgcgcgatgtataagctgtagtagcgataagccacaaggtagacggaaaccgacgcgaccacgatccacagggcgctgacgtgttcgccccggcgtaatgcgacaaccgccagacagaaagcaccgaggatcccgagtaaggcccagggcacgtgcttcagtagttttttagtatccatagtaagacctggttttttatgtaaagaaaaaagggtcagggttcgttgtgaggaggtattgattaatgctggagcgatcgtgccagatccccgcgcgcgtaaaggacgataaatgaatgagtggttgaaagtgccgggtgagcggtcaaaggcggcgacgagcggtttcggcgcgccgccggagggcgaaattatgtgattgagatcacttgattattcgggttgcgctctacggccagatagctctccagcgtcctgatgaatttctccttcagccagctcggttccaggatctgaatatgggggagccagtagaacagcagcggcaggatctggttctcgtgggccgcctggcagcgcagcgtgacgccgtcctgctgctcctccagcagctcctgttccggcagaagatcccggcgcaggaagtaatgtgaaatattatctttgatgaatattttcaccacgaaagtatcttcggacacccagggatcgaggcttttctccagcagctcaagaacattttcttcgggagtgaaggtcgttttctgaatatcaaaccagctaatctggctcaatgagaaggatttcagccggctattttcggtggcttgtaaataccatatattttttttgttaatgagtttatagggattaatcaggcgggttttacccttataaacgatctggcaaacattatggtttttaatcgatttctcgattttcgttaaatgacggcgaatatcgcgttctaccgtatgttccgcttcattgccaagaataagaatatggttttcgtctacgcgcgtttcaagcttttgccagaattccatatttctttcagggaaaaagctgtcggcattcagaaagttagccagagtgtgatgcaatccttgcccacccggcgattgtgcggaatgaatcagccgatatagaccgttaccggtatgttcaacaatgggcgagagggcatttaaatcccggtagacggtgcgttcggtaattttaaatttctccattagcgcaccgcggtttaccacaccgtttaaatgtagctcaaggagaatatcgaccagacgttcagccgagcggctccgcgtcgttttagccataaggtcatcctgtatatataggtatgcgctgaatgatgcgggtgcactgacaggcggcgtcagtattcaggcacagaaaatttctcttatgggtatataacggcgtgatttagcggaaaccttaggagtttttgcagaaagcggcgctggccggaaaaaaggccagcgcgaggggggatcacacggcgacttccgtctccagcatgaccgggtggaagcggcgtctgaagtagatcaggccgtggcccgcgtcactcagaatgatgtttttaatttcaaccagataaaccagatgcgtgccgatggtttgcacctggcttatttcgccttcaaggctggccagcgcgcccttgagtaccggctgcgccagcggccctttctgccagcaggagagggcaaaacgatcctccatcgtcataccggtcatcccggcgaaatggcgcgccatgatctcctgctcgtggttcagcacgttaacgcacagcctgccgttgccctggaataccgggttcatggcgctgttggcgttgatgcataccatgaccgacggcggggtgtccgtgaccgagcagacggcggtggcggtgatgccgcagcggcccgcctcgccctcggtggtgaccacgttaaccgccgccgacaggctactcattgcgtcgcgaaaacgcaggcgttgttcatctgaatgcattgcaacctcccgctgcgctatttcagcagcttgtccagcatgttgatatcgctgttgttgtgcaggtgtggcaccgtccagccgtgttggtcgtattcggacatacagcggtcgaccatcgccatcatcttgtccatattgccggagctctgcgcctggcgcagacactgcaggcgaatttcatcctggctgccggagtagttaatttcgtacagctcgtgacggccgccaaactcgctgccgatggcgtcccacatcagcttcaaaatcttgatgcgttcgatgtggtccatgccgttggagccgcgcacgtatttcgccagatactggtcgatctgcgggttgttcaggtcccgcgcgctggacgggaggtagatcagcccggaggtgacgttacgctcgatgatgttcttgatcttggcgtaggccatcggcgccatcacgcggtaggtctgcagcgcggcgtgatccggcagatacgcaccgttgacccacgtggtggcttcggaacacatggagtcgctcagcgcccagaacatattgcgccaggccaccacttcgccgagatccgcctgcacgccgcggaactccagggtgccggtacactccagggatttcttcagcagggcggtgatgaagtcgagcttcaccgccagacgcacgcaggcctgcagcggatacattcgcgcaaagccgccttccatcgtccagcggcggcagcggtcgaaatcgcggtagatcagcacgttttcccacgggattagcacgtgatccattaccaggatcgcgtcgttttcgtcaaagcggctggagagcgggtagtcgtacggggagccggttgcgcctgccaccatctcgtaggaggcgcgggagatcagcttcacgccctcggcgtccatcggcgcgacgaacatcagcgcgaagtccgggttttcgcccatcacctgcgcggagccgaagccgatcatgttgtagtgggtcagggcggagttggtggccaccactttcgcgccgctgacgataatcccggcgtcggtctctttctccagcttgatgtagacgtctttcacctcgtccgccggcttgtggcggtcgatcggcgggttgacgatggcgtggttgaagtacaggccggtttcctgaatgcgggtgtaccagttgcgggcgttctgctcgaactggccgtagaaggccgggttggcgcccagcgcgcagccgaacgcggctttgtagtccggcgtgcggcccatccagccgtagctcaggcgcgaccactcggcgatggcgtcgcgctgctggcgcaggtcgtcggcgcttttcgccacgcggaagaacttgtgggtatagccgccgctgccggtgtcggtgccccagcacagcgtgtcctgcatgtccggcttgtgcagcgcgtcgtacatctgtgcgatggaggctgccgcattgcgaaacgccggatgggtggtgacgtctttgacgcgttcgccgtagatgtaaatctcacgcccgtcctgcaggctttttaaatactcttcaccggttaacgggcgtttggtgtctgcgcggaactcttcaggcttcatagggacctcgtatcggaattgcgttgttaaatttatgttttgtttttgttgtttaattgaagcctgagaggggcgtaacgtgaagggacgattgggacaacgacgggtacttttcgggtgggttgtggttttgtgatctgtgcggcttttcggcgggtggcgctgcgcttacccgccctacgaaccgtgatgccttcaggaaaccggtactttctgggcccggtatgcgctcggcgagcaccccactaagcgattaaaaaagcgggcgaaataggccggatctttgaaccccagctgccaggcaatttcgctgacggtgctgtcggagaagagcagcaggcgtcgggcctcgcgcagctggcggtcgaagatcagccgttttggcggccggttggcgaagcggcgacagatatcggtcaggcgggattcggtcaggtgcagctcgctggcgtattccggcaccgtccagtgctggtggtagtgggtgtcgatcagctgggtaaaccgctggaacagcttcagctcgccgcgcatgccgcctgacgcgtggtcgtcgagcttcgcgttgcgcagcagcagggtaaacaccgcctgggccagcaggaccagcgtatgctcgcgcccgggcagctgctccgtggattcccgggcaatcagctgccagtagtgcttcagcgccgccagctcgtccggcctgtcggcaagcgaaaggcagatccccggcaggccaaacgcctcccgcgtgccggggtagagcacctccagcagcggccagatcagatcctcacgcaccgtcagcacgtgtccgtcgctgtcggattcggtgataaacgcgtgcggcaccgacggcggggtgaggacgaacagcggggcctgcaccgaatagcggtgatcgtcgagctggagctcaatctgcccggtatcgagaaagtgcatctgaaaatactggtcgtgacgatgcgcctgcatgtcgcggccaaaaaaggccgccatgcgggcgaacgactggtagtgcacatcgtcggtgcccagactttcgtcgtactccttgctgatatcaatgttggcgatagggctctggcacacgatcgttcctctgttgatcccgctgcgtcatcgggatacgcgtcagcaccagcgcgccgaccaccagcagcccggccacaaaccacagccccgagctgaagttgccggtcgcgtcgcgcaggatcccaatcagcagcgggctgacggcggagccgacgttgccgatggcgttgatcaccgccagcgccaccgcgcgggactgcaggctaatcacccgatccggcgtggtccagaatatcgccatggcggtaaacgatccggttgaggccatgatgatgccaagcagctggatcaggctgtgatcggtcgcggaggccagcatccatcccgccgcggcgaacaggtacggcaggatggtgtgcttttttcgctctttcagcctgtcggagcggcggctccaccagatcatcccgaggatggcgcagaactgcgggatcgccgccagcaggccgatgacgatattgctgctgcccgtgttgaagctctgcaggatttgcggggtccagatgttgatcgcgctcagcgtattggtcaggcagaagtaggccagcgtgtagagcagtaccgccggggtcagcacctcgcgcagcgtcgagcgcggcgtgacggattgggcaatcgcaacctcctgctcgcgggcgatcatcgttttgagcgcctgcttttcgtcatcgtccagccaggtggcctgatccggcgtgtcgttgaggtaaaaccaggtcaccacgccgagcaccaccgacggcagcccttccagcaggaacagccactgccagcccttgaggttccacagtccgtccatcgccagaatgtacccggagaggatcgagccgagcatcatggtcaccggcatggcgatcataaacagcgcgttggcgcgggcgcggtgataggccgggaaccaccaggtgagatagaccagaatacccggcagaaaaccggcttcggcaatgcccaccagcatgcgaaggacataaagggtttcgggactggtggcgaacatggtgcaggtggaggcaataccccacactaccatgatcccggcgatccagcggcgcgcgccgatcttcgccagcatgatgttgctcgggatcccgcacagcacgtaggtgacgtaaaagagcgtcgcggccaggccaaacatggttgaggtgaggcccagatctttgcccatcgtcagcccggcgaagccgatgttgatgcgatcgagaaacgagaaaacaaacaggataaagagaaacacgatcaggcgtcggaacagcttgtgaatgacgcggtgttcaacggctttattatcatgggcttgcagggtagaggtcgtcatagtgcgctccagatcttacgtttagtagacggatttattgttattaactgacgtaaccggtttttcgataaagcgtgccgccagcgcttccgcgccgcgggcgagcagggtcgtgtcgaccccgacggcgacaaaccgcgcgccgagttcaagatagcgttttgccagcggctcgttcgccatcaggatgccgggggctttacccgcagcgcgtatctgtgcgatcgcctgttcaatggcggcctgcacctccgggtgctgcggattgccggcaaagcccatgtcggcgctgagatccgccgggccgataaacacgccgtcgacgccgtccacgtccaggatctgcggcaggtttttcagcgcctcgcgggtttcaatctgcaccagcacgcacatggcgtcgttggcctgctgcaggtaatccggaatgcggttccagcgcgaggcgcgcgccagggcgctgccgacgccgcgaatgcccgcgggcgggtagcgggtggcacgtaccgcctgccgcgcttcgtcggcgttttgcaccatcggcaccagcagagtttgtgcgcccacgtccagcagctgtttgatctgcaccgggtcgttccacgacgggcggaccaccggctggctgggataaggggcgatggcctgcagctgggtcaggacggtctgcacgctgttcggcgcgtgctcgccgtcgatcagcagccagtcgaagcctgctccggccagcagctccgcgctgtagctgctggtcagccccagccataggccaatttgcgggcggcccgcctgcagcgccgctttgaatgcgttttgcatggttatctcctagacaaagcggcagctgatggagcccatgttgccgtagtcgacgtggaaggtgtcgcctctgctggcgggcaccgggcgggtaaacgaaccgccgaggatgatctgccccggctcaagctgcacgtcgtacggcgcaagcttgttagccagccacgccacgccgttagccgggtggttgagcacgcctgcggcgacgccggtctcttcgatcacgccgttgcgatagagcagggcggagatccagcgcagatccagctcgtcgggcttaatcggacggccgccgaggatcacgcccgcgttggcggcgttatcggagatggtgtcgaacaccttgcgcgggcgctgggtgtccgggtcgacgttgtggcagcgggcgtcgatcagctccagcgcggggatgacataatctgtggcgttgtagacgtcgaagatcgtgcagttcgggccgcgcagcggttttgccagcacgaaggccagctccacctcaatgcgcgggacgataaagcgatcgacggggatgtcgctgccgtcgtggaagaacatgtcgtccagcagcgcgccgtagtccggctcgctaatctgcgagctggcctgcatcgctttggacgtcaggccgatcttgtggcccttcagcacgcggccttcggcgatcttcaggctgacccattcgcgctggacggcgtaggcgtcgtcgatagtgatcgtcgggtagtcgagggagatctggcggatctgctcccgggactgctccgcctgatgcagacgatgggcgatcagggtatgggtgtgtttatcgagcatggcgtatcctttatgcggctgttgccgggtggcgctgcgcttacccggcctacgttcgagccgttgtaggtccggtaagcgaagcgccaccgggcggaaaagatgtctacttaaacaacgcgtgtacgttgttttgtttgtaattgagcgtcgggtgcagttcgtcgagctcaaacgacagcgccagatagcggctcgccatgaggtcggcaaaatgcgctttgatcagcgcaaacagcatctcccccacggcctcgcggctttccaggctgcgcccggcgccaatcttcagcgtcatatggacaaaggcgtaatcgtgcttgccgtcggccatctgccaggtgtccagccagtgggcgcggctgcggataccgccgatagggaagatgcccgtggcggcgagcgcctcgttcactttggcgaacagccccggcaggtcggcctgctcgcggatgttgtcggtacattcagcaataaagtgcggcatggaggctccttacgcgggcagggggaaaacggcgttgacctggccggtgccggagctggcgaacagctcggtgagaaactccaccttgccgtcgtatttgtcccagccgagcatgcccagcagcatcaccgtgtcgtgcatgttgccctcgccgtagcaatagtcggcgtactccggcagcatgctgcagaattctttgaactgaccctcgcgccacagcttcaccacgcgctcgtccatctggcggtcgaactcccgggtgtagctgttcatcccttcctcggcgcgctggtcgtcgataaagcggtgcgacagcgagccgctggcgagtaccgccacggtgccgtcgtatttctcaatggcgctgacgattgcctcgcccagcctgcggctgtcggcgaaatcgtgaaccgtgcagaacgccgagatggagaccactttgaagtgcttatccgcgttcatgtagcgcattggcaccagcgtgccgtactcaagcttgaggctcggaatgttgtgcgctttggcgcgcacgccacgcttcaccgcttcgtcggcgatcagctggccgagttccgggttgccgtcgtagtcgtaggtcatgtcgcggataaagtgcggcagctcgttgctggtgtacacgcccgagaaatggtccgcacagttaatgtggtacgcgctgttcaccagccagtgggtgtcgaagacgataatggtatcgacgcccagctcccggcagcgcttgctgatctctttatgcccgtcgatagcgccctggcggcagccgtggtttttgcccggcagttcggagagatacatcgacggcacgtgggtgatttttgccgctaacgctaatttgcccattttcagatcccccactttggaatcggatggtcgcccatggagatgcagacgttcttcatctccgcgaatacttcgaagctgtactcgccgccctcgcggccggtgccggaggccttcacgccgccaaacggctggcgcaggtcgcgcacgttctgggtgttgacgaacaccatgccggcttcaatgctgcgcgccaggcgcagcactttgctgacgtcctgggtccagatatacgacgccaggccgtactccacgtcgttggccaggcgcagcccttccgcttcgtccttaaacggcagcaggcaggccaccggcccgaagatctcctcctgcgccacgcgcatgcggttatcaacatccgccagcacggtcggacgcaggaagttgccgcccttcaggtgcgcaggcagatcggtcggtttgtccgggccgcccgccagcagggttgcgccttcctcgatgccgaggcggatatagccggagactttttcccagtgctgctggctgatgagcgcgccaatctgggtgttcggatcggtcgggtcgcccacgcgcaggcggttggcgcgctcggcaaagcgcttgacgaattccgggtagatgctctgctggataaagatgcgcgagccggcggtgcagcgctcgccgttgatggagaagatggtgaacagggcggcgtccagcgcgcgctcgatatccgcgtcttcaaaaatcagcaccggggatttgccgcccagctccatggagtacttcttcagcccggcgtttttcatgatgttgcgcccggtggcggtgccgccggtgaaggagaccgcgcgcacgtcgtgatgccgcaccagcgcatcgcctgccgtcgcgccgtagccctgcaccacgttgagcacgcccgccggaatacccgcctccagggcgagctcgcccagacggtcggcggtgagaggggagagctcggacatcttcagcaccgcggtattgcctaaggccagacagggcgcgaccttccaggtggcggtcataaacggcacgttccacggcgacaccagcgcgcagacgcccaccggctgcaccagggtgtagttgagcatcttgtcgtcgaccgggtaggttttgccgttcatctgctggcacacctcggcgaagaactcgaagttgtgcgaggcgcgggggatcagcacgtttttggtctggtggatcggcagcccggtgtcggcggtttccatggcggcgatctccggtacgttctggtcgatcagatcgcccaggcgacgcatcaggcgcgcgcgctccttcatcggcaggttggcccacttcggaaacgcctctttggcggcggcaacggcctgatggatttcggcttcgccgccggaggccacttctgccaggacctcgccggaggccgggttagtggtgtggaagtagtcgctgcccgcgacgtttttaccgttgatccaatggttaatctttttcattttgccgtctcctcactcacaattcggttcaccaggcgtcccacgccttccacttccaccaccacctcatcgcccggtaccacgtcggacagccccttcggcgtgccggtggcaatcatgtcgcccggctgcagggtcataaagtcgctcaggtaggcgatcaggtacgggatgctgaagatcagatccgccgtggtgccttcctggcgcagctcgccgttgacgaaggtgcgcagggcgaggttgtgcgggtccggaatggcctcttttggcacgatgttgggggaaatgggggtcagcccgtcgcggcttttcacccgcaggttcgggcggtagtagttttcgagatagtcacgaatggcgtagtcgttgcagaccgtgtagcccgcaacatagtccatcgcctcggcttcgctcaccttgcgggccgttttgccgatgaccaccaccagctccgcttcatagtgcatgtactcgacgttgttcgggcgcaccgaggtctggttgtcgccgttgaaggtgtttggcgctttgataaagaccagcggctcggtgggcggcttgaagtccagctcgctggcgtgatcggcatagttcaggccgagggcaaacagcgtggcgtgcgggggcgtgcggtgcgcaatagtgacgtcgcgctcgtccaccaccgggttttccagcggtggaaacccttccgccagaatacgcacccgatcgcccgggcggatctcaacgcggctgtgcggggtaccgagcaggatcgcatcgccgggattaagggtggcgaactcgctcagggcgctcagcagttcggcagcgttacgctgcagatcggcggtgttccagtggtccgcttcgcggccgttgatctcggtgatgatggtcaggctatccacgttatcaacggcgaccggttcgccgagcgggcagaatccgtcgcggcatttggccttgatggccgggcggtagaagctctcttccggcaggctcacctcgttggccagcgcgtacccggcgatgtacgccgcggcgtcctccacgcgcaccttgctggcggttttaccgaccaccagcgctaccgtggcgccgctcagcaccgtttccccctgcgggaacggaatgggctcgcctgcacggatcacggtgttatgcggtttgataaaccacaccgccgttttcggcggcgtgttgtagggggctttttcaaatgcctctcgccaggcttcgcgctggctctgatggttgagggcgacggcaaagacggtacctttcattcacatactcctcaggccggaggtccggtttggatttcattaatatgttaatgatctggttttatgcttttgctgattatttcgcaatcagaagtgaaagatttgtgacacgaataacaataaatttacatattggtttttattgatattaaaatcagatggttaataaacttagtgggtttctgttagactttttgacggaaaacgtgttgtttataaaagcatcttttatgaattgtttacgtgttaatgatgtgaaggggagaggctatgcatgattcattaaccatcgcgctgctgcaggcgcgggaagcggcgatgtcctacttccgaccgatcgtgaagcgccataacctgaccgagcagcagtggcgcattgtgcgcgtgctggctgaacatccgtcgatggattttcacgatctggcgtttcgcacctgtattttgcgcccgagcctgaccggcattctgacgcgcatggagcgcgacggcctggtgctgcgcttaaagccgctgaacgaccagcgcaagctgtacgtctcgctgaccaaagagggcaatgcgctgtatgagcacgcccaggcgcaggtggaggaggcgtatcagcagattgaggcggaatatacgccggagaagatgaaacagctgacggcgctgctggaagagtttattgaactcggaaaccgacataacgcagcgcgggaagaagagtaaaaaccacaaatttcaggatgaatttcgtaaagttttccctttccaggccgaaaattctgtatctgtctgaggaaagagaaaacatgttaaaccgtatcaagattgtcaccagcttaatgctggttttagcgatatttggccttttacaactcacatccggtggtcttttctttaatgctctgaagaatgacaaagagaatttcaccgtcctgcaaaccattcgccagcaacagtccacgctgaacggcagctgggtagcgttgctgcaaacccgtaataccctcaaccgcgcgggtatccgctacatgatggatcagagcaatatcggtagcggcgcgaccgtgaacgatttgatgcaaatcgcgtctgcgtctctgaagcaggcggaaaaaaactgggctgcctacgaagccctgccgcgcgatccgcgtcaaagcgatgcggatgccatggagatcaagcgtaactatgatatttaccacggcgcgctggcggagctgatccagctgctgggcgcgggcaaaatcaacgccttcttcgaccagccaacccagagttaccaggacggttttgagaagcagtacgtgagctacctgcagcagaacgacaagctgtaccagatggcggtcgaagacagcaacagttcctacagccaggctatctgggtgctgatcggcgtcctgattgccgtgctggtggtgattgtggccgtctggctcaacatcaagcagacgctgatctctccgctgaatcgtctgatcgacaacattcgccatatcgccagcggcgacctggtgaagcgcattgaggttcagggcaccaacgagatgggtgaactggccgactcgctgcgtcatatgcagggcgagctggtgcgtaccgttggcgacgtgcgtaacggcgcgaatgcgatctacagcggcgcgagtgaaatcgcgatgggcaacaacgacctctcctcccgtactgaacagcaggccgcttccctggaagagaccgctgccagcatggagcagctgacggcgaccgttaagcagaacgccgagaacgcccgtcaggcgagccatcttgcgctgagcgcctctgaaaccgcgcagaaaggcggcaaagtggtggacaacgtggtgcagaccatgcgcgatatcgcaggcagttcgcagaaaattgccgacattatcagcgtgatcgacggcattgctttccagaccaacatcctggcactgaacgcggcggtagaagcggcgcgtgcgggcgagcagggccgtggttttgcggtggtggcaggtgaagtgcgtaacctggcccagcgcagcgcccaggcggctcgtgaaattaagagcctgatcgaagactccgtgggtcgcgtggaagtgggctcaacgctggtcgaaagcgccggtgaaaccatgggtgagatcgtgaatgcggttacccgcgtcacggacatcatgggtgaaatcgcctctgcgtctgacgagcagagccgcggtatcgaccaggtcggtctggcggtggcagagatggatcgcgtgacccagcagaacgcctcgctggtggaagagtctgccgcagcggcagccgcactggaagagcaggcaagccgtctgacccaggccgtggcggtgttccgcattcagcaggagcagatgaaagcgcgtgagttcgcttctgcgaaaaccgttgcagcaccggcgatggcgcgtaaaacggttaccgctgatgctggtgataactgggaaacgttctaacccgtatgttgtgccgggtggcggctgcgccttacccggcctacggtttgtggttttgtaggcccggtaagcgcagcgccaccgggcgatattacagaggcaggtgcatggcgcagcgcgtttcatacgcgaaaccgtgcgctgtctcttcttcccttttccgacgcagttcaggcgtcagcgtcgtcattttttcaaaccccagccgcgcatagaatggtgcattccacgggacgttcctgaacgtcgtcaacgtcagcgctgtcatccccctgttacgggcatggtctgccacgcaggcgatgagctgcctgccgatcccttttccctgccagtccagatcaaccgagagttcgacaataaacagtgaagacggatgggcttcggcaaggataaacccgacgggctggtcgtttgccagcgccagccagcttaacccgcgttcgacatagccgaggtgttgctcagcggaaatgacctcgccatcggcaagccaggcgagtgccgggaagtcacggaagcgcccggccgccgcgcgttcaatggcgggcagggcggcaatgtcgttgagggtggtggggcgaatgcgaagagtcatggcggcaagtatagcctgacccgtcgacattattccgagcagatcagcaccggcgaatagaaattgctgatcaccagcgcgtcttccggcgtgcgctcgatcgtcagaagccttttattgcccagcgtcaggccggcaacgtatttttcaaagaccccgggcggcatagcatcatggctaaaacgctccactttttgaatagcgatctcatacagttcgccctcaacgtgacgccatttaaacatctcctggcgggaaacctcccagctgcgtggggcattcaccacgctgccgttaaccgtgatgtacccggttttgtcgggatgaaaacgcataatgatctcaccgtcaaaggtgaaatcgtggttgtcgcgccggtcggaaaaggtcaggtttccgtcgcaggccaccgacagcgggggcgtgtgaaagtaccacgccagcacggtgcccagcagcagcaggttgaggatcagggttagccaaacttttttgtgtctcatcatcaccactcgtaatagtaaagcgtacgacaggcgctggctttaccctgcgtgagggaacattgggagagcaccagccgcccttcgtggccgtagaaaagcgttctctgaatgtgcatgtagaaaattgaatttttcaggcacggaagatggccgtccttctgaagcgtttgcgccagcgttattgccttcccgtgaaatacgtccgccagcggcgtaaaggtgtagaccgggcaggtgccgatatgcgtcagcagatggatctccctttgtgaattttctggcttgatcagcgcgatccagaggcatagcgcaacgacgaccagcgtgagcgcgccgcagaacagccattcagggcgaacgcgccatgcaggtttcgccgtttcggcggtcggcggggcctcctccagcggagtgaccgtaacgtccgcgctgagcataaagcccgttttcggtacggtaacgataagcagcgcgtcgggaagcagggccgccagcatcttgcgcagaatgctgatgtactggtttaaggagttgttagacccctgaagccctcgccgatcccagacttcctgcagaaaggtttcccgttcaaccacgttcccatgatgctgaaccagcagcttcatgatggtattggccgtacaggtgaggagctgcgcatcttcatccggcgcattgataagagaaacagaaccgtcctcgtcgttatagacgatggcgtcagcaagcaggtatttcataagttgttgtaataaaaacagagataaaaaataaaaagagaaggtctacgccttccgggctgcattgctggctattttaacgccactgttaccgataacattgatccagacaggtttttgggtgatttaataagtcagcgtgataatcacgtcatcaataaattccccggtaccggttagcggctgtgccgggacctcgccgtaaacggtgtagttctgggtgccgccagcgggattggtgacctgcagcgcatcgccgctgctttgatctccccagcgttgcgtggccgcctcatcctgccagagcccgtagcgcaggcactggccctcgttgttgcagagctgccgctgattaccgctggcatggttgcctttgcccatggcaagggtgaatgcggttccggccgggcagcgcgtggtcagggtggcggtggaacgcgtcggacgcagggtcgcggtgctggtcagggtgccgaagttaaggggcgtcacgcgctcgatgtagcatccctggctgatttcggcctgcgcgctggtgccgccctgcacctgctccccctctgcggaaccgtccgagcagttttgcagggcatcctgacgcagggcgctgtgccaggcgatgcgcagattcatgttgtagttgtaatagtggtaggccggaagctggctttgccctgccggaatggtagcgataagcggaaaggtaccgctgacgttggcattgctttgcgcggtcagagtctgctgaatcaggttcccgctgctggcaggccccagctcctgagagcgtgctgcgccgttcagcaggcggaagaggagggtgtactgttttccctcctggtcccccggcgagatcatcttaaaggggggggcgtctactctgctcaggcagacgttgagatattccgtcctgccctcgttgtcggcctggcagctaaattttacctcggtgttgacggaggtggtattgcccgccacgacgttgccaaagttaatggcgggcatggaggttatccagcaggctgccgccatcgcctttacggacaggacgagcagcaataataacggcgctcttaatgacacagttgttctcccatattctgtatagatgacgcggtacggggcgccggaagcgcgacccggcactctccctcaccggtcttcaccaccagttcacccggcaggggcggatcttcaagccagataaagccttcgcggcccacgatggtggcaccctgcggcgttgacacgacgctgcccagcgggagcggcctgcggcggctgtcgaccagccgggcctgaaccgtgacggcgtgatggacgttaaactcgactttgaccgcgctgttgttgcccggcctggcatgcatgtcggtgacgggggcgatcacatcggcgggcagatcgagcgggttaatgctgactttgctgttgtggtagcgcggcaggtcggtcaacaggagataaccgtcctcatccgtttcaccggccggacggttttccagcatcaccggtacgtgcccaatgccgtgcgtggagaccagcgccatgccctgctggatgtagcgcagcgcgtgcaggctgccgtccagcagcgtcaggctcccttcggctgaggcgtactggttgcgctggctggcaccttgctgcagcccaacgtgccattcgcccgcgcggcccagatagcctgcgtctgcatatctttcacgtcgttcgccaaagccctggcccagctcccatgaccagccgccggcctcatcgtccggctggtggcggtaatccatgcgtggtttatcccggctggcctgaacggagagcgtgtcctcgcgacccaatgggacggaaagcagtagctgaacctgactcgacgcatccgtaaacgagcgggtatagctcagcgtggtggagatgtgtgccggcagcgacaccgaccaggaggcattgaggtagcgctgcgtgctgccctgaatgttctgctgtacccagcccgcgcccacggtgccgaagtgggggacggactggcttacccaaacgctgtcgctgcgtctgacgggggcggcaccgctcatgcgggcgttgtcggcgaaatccgcctcggtgcggacggtgctggcagaaatgcccgttcctctgccgttccactgccagccgaggccccactgaacgccctgaccgtaagggctgtcgctcacggcaacgtgctggctaaccacccctacggcgggagagaccagccagtcagcgcccgtgcccacgttgtgcagcctgcgctgctgctccgtatgcagtgccagcgtcaggtgattattcaccccatagcgccagcccgcgtccagcagcggcgaggcggcatagtcgtcggagtgcagggcgtagttttcccgcatccagccgatgtccagcgaaccgctgctgagcccttccgccagcatgcccggcgcgccgtagagatcgagctgtacggtgcgacgctggccgttgatatcggtaatcaccacctccgcctgcccgcttccggtgaaggagggcagggtatccagcagaaagtcacccggcgtgacgcgctggctgctctgcttaaggccgtcgatatacaaatcgaccgtggaaggcagtacggccgtgtcgctgtagcggctgcgcggttcggtattgagttgcggattgagctcaaaattacgtgcccagtgcagcccgccaaagcgcacctgtcggctccagcgggtgccggtggtgatgctgtcgcccagcgccagcgtggtcagcgagtcggtgttgtcccactgccagcgggtttcgagacgcgtgtgggtcggtcgaccggcgctgttttcctccccggcatggcttgagaaactgctgctgaacgttccgggtaatcctccggatgcggtcagcatggtctgggcgttgagctggcgcttcccttgcgcatcgctggcgtagagcgcgtatccgagcgtataggcgctgacgggttgcgcatcagggtagcgatacatcggcgcgggctttgaggcggtgagatgctgctggccctcgagcgcctctgcctcagcggtaatcgacacctgctgggacagcacgtcgagattaaccttcaggcccggcagggacgtcagctcaacccattcggcgcgatcgtccggggcgtgaagccccagctttttcatgtcgctgcggcttatccataacgcattatccaccacccggcaggcccacagctcgcctcgcggggcgtggttcacggtaatggccagccattgtacggtgtcggcgggttcagtccgggctgacagcatgagcggtagccaaaacaggagcgcgagaagcgagcgggcgcaggggtatctggctggcatggtggtcatcattgagatagacgcgcagcgtgctgagcgcgtgacgtgaagcgtgtttaagcggcaaaagggcggtttgtcccgggagcacatagcccgccaggcctttaatcgaccctacaacctgcccatcggccgtcagggcctcaaggtggctcagacggatgtggcggtttccggcattaaagcagcgaagggtggccggtatttcagactgctcacagctcagggcatcgtggctgacgggcgcgctctggttaccggcaataaacaccggaatcgagtagcgcagcaggaagtgcaccgcggtgggattggcggcacgggacgtggcgtccggcagttcgtcgatgaccagccggtaactttgctcctgtgcacggatgccgggctgcatgacgataatacgcaccagctgctgctggcccggcgccagtgatgtcatcgccgggctgctgaccacctccccggtggccaccagaacatctttaccgtttttttgcgtccattcgtacacccgaatctgcgcatggatggccgctttcccactgttagtgagatagatagccgctgcccgctggtcgctctgcagatcgagcgttaccggggccacctgaagcgtggcggccagcgcgtagcgtgacagcagcgccagcatcatgagccacagaatgaagcaggaaagatagcgacgcacgatcagtactccagttttaacgtgatatcgtcgctgtaggtacctgcctgggcggttgtcagcgccccggcgtcaatcacgccatacagcgtttcttcctgttccgcgccattgccggtatcgtccagcccattcgtgccggtgatttgcgtctgtttgccttcgtcagcaaagagcttccacgcaatcttctgcgcgcccgtgtcgccgttttccggcttcagccagaaggttccattttcgccgtcgttgctggtggcggtcagagtgaacggcgtgccgttggtgcagacgatatcgacctgcgttttggcctggatttcgctcgactcatcggagccgtgacgcgagaagttgaggtcgttggctttgagggtgcacgacttcacgacctcaagtgatacgtgcatcgtcgcgcttgcggtgctgtctgcggcgatcgcagcagcaggaagcaggagaacggaacaacatacagcggtgggaataattttcatgatcttatttcctgacgtgagtaacagtgcaattacaaagcgaatgactgagcgtccagcaggcagcgtttttgatggaatgccgccaggttgtggcagcaacaagtggggcaaggccataaacaggcattgccgcgcagaacgatgaccatatcgccagcattcggaatgagaggggtcattttctgccccacagatagccctggccgtaatcggccgcgctggcgcgggccagtgcgaaatcacctgcggtttcaatgccttcgatcagcaccttgctggcgacgcgcttgcactggcgggtgagatgcagaaacttcgcctgctcggtccgtccgttccagaaggtatgtttgtcaattttgatgccgcagaagcggatctggctggtcagaagttcgggaagaaggtcttcgcaaacatcgtctgcccacacttctatcccccactgatggagcgttgcgatgcatttccgcagcgcccggctttgcgtatcgtcgagttgtaccatcgaatggagatcggtgacctcgatagcaagtctctccgggcagggtgtttcttctttgagcctgtcgaggaagtccgtgtccagcagtaaatccgatgtcgcattgaggtaatacttgtcgccatccttgcaaaacatggcgtgacgaagctgcgcaaagaagtgcgctttacgctgggtcgcggtcatcgagccaaagtaatcttcaagattgacgtggggctttgccgtggacaatacctcccaggcaatcacattttcactgcgcagtgcccggatggattcgaacttatagccggttagcatgataaaagtgcgtaacgctccgtggtgatttcaggagctgcacattttatggatttggtttttggcaggatatttatagataaaaatggcttatataaagtgtttttatctattttataagatttataaaggattatttattttcataagcgcccgacagaacgccgggcgcgacgcgcattaacccgctttgctgatgattttgatttcgaccatgccaattccgatctcgcgcggcgaatgcccaaggatatttccctcattcgtggactgcgggtccggcggtacaatcaccagggtattgctgcgcgaaggattctcaaaatgcagcgtttgtgtgctcacgtcgtttccaagcgttaacgtctgctcccgatcgcccacgcgcacgggtacgggcttgttagcattaggcccataggccctggcggtgatcaccagatcaaattgttccggcaggggatgggtgtactcaattttcacctcattgcccagctgcgcgttggaccagcgtccccaggactccggccgcgagatgccgctaaactgtttcacttcctccggcgcgccggccacgttaaagataaagctgtccgctttgtagcgaatatcgttgtcgacgattttcagcatgtcgacgttacgctgatagcgcgcggtatcaatcaccgtatctttaaaggcggttttgcccttccactgcgccttatccacgtgctgaacggtttgttctccgccaagctggccctgcgagacgcaccagtcggtcgagagcgccagcggctgcgaccagagctggcccattttgtagcaccggtcgacccagacgaagttatcgcgtggcgcaaaatcggccagctgatagcgcagcggcgcggaatactcgctttctggcagcggctcaacgcgaccctccgacacgcgtaccagcagcggcaggcggaagttgctgcccgagaaggcaatggtgtttttatcccgatcgacggtgaagtccttcatctctttcgggaagttccacagacggatgatgtcgggcttccaggcgaggattttttccttcatgttgaggaacacttccgacagggattgccccgacagcgtgctgcggcccaggccaataaagttgtcgccgcccagaatgtccagcacggtggcgccgttatccatggagttgcgtttggtggcgatctcctcctgctgcggctggtcgccgcgcaggacgaagaacaggttgctgcgatcctgcttgttgagctgatcccacgcgctgtttttcatcgccagatggtcagacgagacgacgatgacggtgtttttaaaccagggggaggctttgattttctcgaccagtgcggcgatgtgctcctgactgcaggtgacggcgctgaacgatttgttgtttttgccatcaatctcatagcttttgcgcttacaggtgcgcgagacaaacccgtccggatggtgggtgtccaccgtcagtgcaaagagagagaaacgcttgcccgcgcgggacagctcctcgaatttcttccaggtttcgtcgagtaccgtatcgtcatagaagccccagtcgttgcggtagctcggatcggcaaccgtcgtttttaactcttctgagccgtacaggtggtcaaaaccgtgggatttcaggaacacatcttttccggcgaagcgcaggtttgctccctgcataaaatagttttcgtagccggagtttttcaggatatcgccgaggcaaatattctgcgggaagaaggtcgacatggaggctgaggcgttaccttcaaaaggcgcgaacagcgggataccacactgggaggcaaccatcccggcaatcgtataatccgtgccgggcagctgcatggtgtggctgaaatcgagaccttcatttttcagggcgcccaaatctggcgtcaggtccgggaaggcatcgttatcaaagtaggtgcgctccaggctttcaccgtagatatagaccagattgagcgtcgggttggcgatcgttttcgacggctctttgtagtaagccgcgaaatccggatcgccatcgcgcgactgggatttcaccagctcggtgatctgatggaacgccgggctggcgtcgacggaggccagcgccaggaataacgccagcaggctgtagccatgatggtgtggatgatggcgacggcgacgcagcacccaggccagcgcgccaaaaatcatcaccagcgcgacgataaggccgagccccggaagtatgtacttacccacacctgcgcccgtcaggctgttcgtcagggtgtagagcaccgcatcgttaataccgtcaccggtaaagtaatcgctggcgtataaggtaatgtttaaaataataaaaatgccgagcaccaccagcgtggcgataaaccaccaggtgtgacggccggctttccaggcgtaaacgccgacagaagccagaaaaaggataagagacaagaattctgacaacagcatatcctcatgacgccaggtgcttcgctggctaactgtttattttttgggtgatacaatgtaattgcgatgtcgttaagctgcaattttagtgtcacgaaagtgtgctgttgttaggatttggtttagaaaatcgtttttatgaagatgtgcacatcctgacaaacggacgctgagacggtggcaggcaggaaaaacgctcatttagcgccgcgctgcaagactatcgcactaaacgcggcgtgttgtggcagaaaatggggtggatcaggagatgaaattaacgccttgtttcagcaccagatcgcaggctttggttttcacctgtttggccagagaagagttgccgagggtgctcaggttaagctgctgaccgttctgcgcgttaagcaggccctgaatgccgtccatgtagttggtgtccgctttttgctcctgagtatccagacccagtttacccagcacctggttttttacattttgcgcgtcggtcacggaggccagcttttgcttcgcgcaatattccagaatccccgccgcgttgttcatcgtccccgcgctcaggctctgggaactgttgcccagcaggctggtgagggaagaggcggagagtccgccctgcgtgctgctgctctctttggtcagctcatttgctgcgcttgacagagactcctgccaggacgccgcctgcgctgcgccggttaccagtagcgcgcctaaaaaggtgctgattagaatctgttttttcatcatggctctctcaaaaaggtccgttttgggccgaaggggttccagtatatacctgcgacctgtcggcgattcctggaactgtcttaatactctttcccggtgacgcggctgcggtaactgtcccagtcgaagatgacatagagactgttacccagcttcatgcggtccatgacgcgttcccccagcaggcgggtcatctcgtcgatattatggttcgtcagcatgccggtagggcgcttggacgaggagcggcgatcgacaatctggttgatgatgactttttcatagcgggattccgtctgaacgccaatctcatcgatgaccagcaggtcgacgttactcagatcgttaagcagctgttcttcgctggtttcacggttgctgaaggtgtctttcatcgcggacatgatatcggccacggtgatgatcaggaccgatttaccgcgcagaagcagctcgttgcagatggcggcagcaaggtggtttttgccggtgcccggcttgccgctaaagatgaagctggcgatattgccgtcgaattcatccacgtactgacgcgcggcggcgagcgcgttcatctgcccggtggtctcaattttatagttatcgaacgagcagttctggtgcaggggacgaataccggaacggttaaaggtgcgctgcattttcatcgcccgattttcgcgggcgagcgcggcggcgcggatcttgccttgctctttttgccacgccagcagctcttcaccggtggtgaaagcaggctttacgttggcaggcatcattttttgcagacgtttcatcaggtcgccgacgttcttcatttcgcacctcggaatccgctggggatctgtttatccggttctgaaaaggcattgatatcacgttttggctggccgttgttgccggcgcgggtaatctggagatgacgcgcgagcttttgctgccactgaatatgggtgaacactttaccctccgcctgccaccaggcggtaaacgcggcaagctcttccgcggtggcgggttgggttaacgaaatgccccacagcgcggcctgccgctgaaaatctgcatccggctgccagcccgcatagagggcaaatttacccatcggaacggtcacgggaacgttaaccggttcatcaaagaactgggtatccagcgtgacatcgcttgccgggcgtgccaattgcgcttcgatctccagaagctgtgccagacgttccggtgtgattgcgtaaaacgctggcgcgttgtcggcaaaaaccgcaaccgtgccgccttcagcgtgggtcaagacaccgcgtgggtcgcgcataaaggcatcaataccagcaatgctggtggtcagaattctggaggacataacgcttactctactgatgactacgggcgtgataggggcttatggtagcacagagaggggaaaggaaaggaggggatttccccggtggcgctgcgcttaccggggctacagtcgtaggccgaataagcgcagcgccatcaggcagttatcacgcaatgatgttcagcgtgacgtcgatgttgccgcgggtcgcgttagagtacgggcaaacaatgtgtgccgcatcgaccagctttttagcttccgcaggatccataccttcaacatggatgttcagttttgcttcgataccaaaaccggtaggcagcgggccaatacccacttcgccttcaataaaggcatcttttggcagggtaaatttgtcgcgtgcggccacgaacttcatcgcgcccaggaagcaggcagagtagcccgcggcaaacagctgctcagggttggtcacgtctccccccatgccgcccatctcttttggcacacccagtttgacgtccagtacgccatcggaggaggtggcacgaccgtcacggccaccggtggcttttgctttggcggtataaacaactttttctaaagacatggcaggttcctcattttgtttagattcgtgctattaaatagcgtgcgatatatataggtaaataatgacgcgtaaagtatagcgttacgcgcggtgtagctgttgtcgcaaaagttcgagctgctgtttgagtgccagcaaggtgtctgtatcacactgcgctgcgcaacccaccgcatgggggatacccaatgcctgctgctggagttcacgtcccgcttcactcagggtgacggcgacctgacgctcgtctttgcgcgaacggtggcggttgatgagcccggcgttttccagacgtttcaacagcggcgtcagggtcgcagagtcaaggaacagccgttcaccgatgtccgacaccgtcatatcatcctgctcccacagcaccagcatcaccagatattgcgggtaggtcaggttcagcggtgccagcagctgccggtacagcttgttaagcgccaggtttgccgaatagagggcaaagcagagctggttatccagcttgagcgcagcggttgcatcgttcgttttcgcgttcatgagatgaatataggtagtgtacgatttaattgcaagcaattttatgggcaggtgtaacggagcgccacctgaacggccattttacggtagtgctggcgctgcgcctgctcgtctgcgccttcttcaaacagcagcgtaaaggtgtagctgttggcaacgtagtgaaagctgaagctgcttatcagacgatgaaggccgcgggcgtcaaccgtctcactgaagagctgtttttctttcccccggcgcaggatctcctccagcaggtcgagcgcgctgcggttgacctggcgaagatagctcgactgctgcataaagcggccgcgctgcatgttttccatgcagataatccggatgtagtcagggtggtcggcatgatagtcaaaggtggcttcaaccagattgaccagcgcttcgaccgggggcattcccgtcaggcttagcgctttttcgctggcgcgaatctgggtgtaaacatgttcaagtacgaggagatagaggttctctttattcttgaaatggtaaaccaccatgcgtttggtggtgcccgctttctctgcgatctgctccatccgtgcaccgttcaatccatactcggcaaaaagcgcgatggcgctctgaaagattttctctttcaggctggattcttcactgtgctcggggtgttcgctgccagggttagccacatcctttccttattttcaccaaacggaccagacggattatctccacggcagcgaaataacacaaatatcaaacgcgtgggcgtttacggtacagccacaggccggggatcgacagcccgatggagagcgcgccgacgatggatgacgccttaagaaagttgctgagaagaaggatcatctgaggctcggtatagccgaaatggctgattttcaccgcggaaatcatcgcggtataggccgatatccccggaaacatggggatcacggccgcaacggtgaatactttgggatgcgccagataccagcgcgaccactggatgccgatactgccgaccagcatggatgccataaatgttgaccattcgatgttaaaacccgtcgtcatcatcaccattcgcgagccatggccaatcgcgcccagcagcgcacaccacggcagcgcgcgttgcggtacgttaaataccatcgcgaagccgacggcaggaatggcggccagaagcatgtcctgcgccagcgccagcagaaaatcgatcacgcccatccgcgtaacccccaaagtgtcatggccatgaccacgccgatgcaggtcgccagcgtcagcaggctggcgatagcccagcgagccaggccggtattgatgtgccctttaaacatgtcggcgacagcgttgatcaacggaaagcccgggaccagcagaagcacgctggcggccatggcaacggtcggcgtgttggcaaactgcggcaggcgcagcagcagaccggaaaccgtagtggcgacaaacgcggtaatgcagaagttaatttgcggatgcagctgccgatgcgtcagcagctggcgaacatacatggcgatactgctggcgaaaaaggtgatgattgcaccgtcccagccgcctttgttgagcttacaaaagcaggcgcacgagagccctaccatcaccacgacgagccagcgcggataacgtaatggcttgatctggttgaaccgtttttcaatgtcactgagatcgagaagcttatgttctgcaaggatgacaatgtgctgcacttcggtcacgacgtgcatgttgatgccgcggtcatggtttttgcgcgtggaggtcaggcactgaccgtccttaattgtggtcagcacaatggcgttggatgagattgcgctttcgacgctgtccatccctagcgccagccccagccgggtggaaagctcctcaaccagcgcactttccgcgccgtgctggagcagaaaaagaccgcactgaatacatagccgcgtgatagcacgctgcgttgaccgctctgcctgcatgtattgtcctgaaaaaagatggatagctatctgttaacccatagtgggtacttttagcacagagtgcagtccctcttgctttgggccagatcaaggtttgtgcaaacagttgcagtccgtgtcgtggaagggggaagggggaagggattaatttatcaataccatgaattataaataccaaaatataaaatatttgtatttagttattctaattttatattgtcgttattttaatgtctccacaattaatttttgtttcgctttgtgagatattactgctgtttaggcatttcttaaactaagcatacatctcatcttctgcttgtattaaccagtcttacactcagggacgaaaatactcatacgttgatgcgttttaacgttactcatcaaatgaaaaatggacacggagggtctatgttgtcattgcatggtaagcatggcgttgtcattagccggatgcccgtgatgcaaaacgggttagggggcctgatggcacgtcatttccccgaatttgaattgagctattgccgctcattgcaggaattaacgctgctccagttgcgccgcgcggacgtcattattgccgatatttcaggcgaatacaggaaccctcggggtgcgcttgaagagtattacggtttattgaatcaataccgggatattcactggatctttttagtctcgcggccgctttaccctattgcggttgagttacttatgcgcccggaaagcacgttgctttctgacatggagcctattgaaggcgtggttaacgctattcgggccggtagcgagcgggcagagcggattagccagacgttattaactccggaaccacagagtacggagaatgaaaatgaacacgttatcgcgctcacgcactccgaacgtaaggtcctgcgtctgttagggaaaggatgggggattaaccaaatcgccacattgctcaagaagagcaataaaaccatcagtgcgcagaaaaacagtgcgatgcgacggctgtcattacgaagtaatgcggatatgtatgcctggatcaatagtacacaggggatgagagagctgagtttgctatcagcctatggagagttcgaggaatggaaaaaaccgattcaacaagacatatcgccatcatcgaaaattgcgcgatgagtgccgtcgggctacagcatctttttgcgatgcccggcctgagccattatcagctacacctgtttagtgaatttgacagttttaagaatgcacttcatcacgttaattttttctcgctgatctactccctttccgatgcgcgagaggagcgccgtaactgcctggcgcacctgcgggatctggcgtttacgcacggtcatatccagcgcatcattttggtttctgacgagatggaagcacggttaattagccatctttcgccatcgcgcctgcacggagtagtcagtaaatcggtgacgcttgagcatctgcagaaggaacttgtggagttgctcagcgaaacgctgcgcatcaatgacaatatgctgaatcactggtaccggagtcagaacaggatgctaagccccacagagcgggcaatattgcgttatatgtcctgcgggtattccatccctgaaatcgcggcacagcttgaacgaaatattaagaccattcgggcacataagtttaatgcgatggtgaaactgggcgtgaattcagacgtagggttgctcgatgcggcggatattattacgcatcttcctgcaagagagccgcaatgtttggctctcatcacgcccacatttttataacccgtcttttgcgcgccagatatactctggcgcgtcaatcagatacagacatccacccattttgcggaagtcagttctgccattctgtcaggtgaaatgcgcacagcgctgtgaattgcgcctgcggcgggcagcacttcggcgtactgcttcaaagagatatcgcaatataccgcgagcgggttttccagcccgaacgggcatacaccgccaacgggatgaccggtaatggtcaccacttcatcactgctgagcatgcgcgctttcgcaccgaacgtgtctttgagctttttgttatccagacgcgcgtcgcctttcgccaccaccaggatcacctcatttttaaccttgagtgacagggtcttggcgatttgtcccggctcgacacgatgggcggcagcagccaacgcaacggtagcagtactttgactaagctcaataacgtctatatccggcgcgttgtcggcaaaaaactgctgtacagactgcaaactcattgtttcctcctgacaaatatcctgcgtaatctgtcataagaatttatgctctgtaaatatctcttaagtaacaaataccccaaacggctgatttctggatccccttcacaatcacagaaaccggttacagtaaccggttgcagagcgcggagcgtagattaatactgagtacgtaacgtcccctgtatccaataataagagccaaatatgaaaccatttcgtctgagcagtaccgctggttggcaagccagcaaggttgtgaagctgatgtatggaacaacgtgcggcgcgtatgtgcccgtaacaaacgtctgacaggagatctgccatgtctgccaaccatgctgcgtttaatctgatattccgtttcgtcgaaaattacgtcagcccgatagccgggcggatctcttcccagcgtcacgttatggcgattcgtgacgggttcatctccgcgatgccgtttatgattgtgggttcgtttttgttagtgttcgcttacccacctttttcgcctgataccacctggggtttcgcccgcgcctggctggatatggcgaagcagtttgaaggccaaatcctgacgccgtttgatatgacgatgggcatcatgtccatttatatctgtgccgccattgcctataaccttggcaaacactacgtcaaatctcatcagctggacccctttatgtgcgccatgctgtcgctgatggcgtttctgctggtcgcggcaccgaaaaccaaaggcacgctccctgtcgacagtctggggggaacgggcatttttaccgcgattctggtggcgatttattgcgttgagatgatgcgtttcctcaaagcgcataacatcggcattcgtctgccggagcaggtcccgccgatgatcaaaaactcttttgatctgctgatcccggtgctggtggtggtgttgaccctctatcctctgagcctggtgattcagtcacagtttggcatgctgatcccgcaggccattatgtcggtctttaaacctctggtttccgcggcagattccctgcctgcgatcctgctggccgtgttgattggtcatctgctctggttcgccgggatccacggtgccgccatcgtctccgggatgctgcagatgttctggctgacgaacctgggcgcaaaccagaccgcgctggccgccggtcagccttttccgcatatcttcatggaggcgttctggacgttctttatcgtaattggcgggtcgggcgccacgatgggattggtgatttgctatctgcgcagccgttcagcgcatttacgctctatcgggcgtttgagcgtagtacccagcttctttaacatcaacgagccggtcattttcggtacgccaatcgtgatgaagccggtgttctttatcccgttcctgctggcaccgatggttaacgccgtgctggcgtgggcggcgatgacgtttgatttgattgggcgcgtcatctccgtggttccctggacggcaccagcgccgataggcgcagcgtgggccctgggctgggatttccgcgcggcgattctggttgtggttctggcctgcgtatcggcgatcatctacttcccgttcttcaaagtgtatgagaagcagctgctggagcaggaagcggaagaagcgcagcgtagcgcggaagaggacaatcagcaggtggcctaggtaaaagcaaaacggcaactcaggttgccgtttttgtttttgtaggcccggtaagcgaagcgccaccgggcaattcactgctctacttgagcgtgcaatccccacactgcttaacgtccggcaggcgatagcgctggcagcaggtgcggcgaacaagaagcccatcacggagcacgacggtacggaatagcgggttgtcacggccatcggaaagctgctttgcaaagaaacaggactgacgcagggcctcaacgttctcatcaccgagaagcggcttcatttccgttaaataccagtggattaaatagcccgtattgctccagataagcttcccgttaatctctcccgtcgcttccagcgcttccaccaccgggatcagggcctgcgtgatgagccgctccatacgttcctgagcagtaaggcgttcagcgctgtggtcttcgtggagatcaatccagaaacaggccgcacgtccggtttcgtgaaactcgacgtggaaattatccggcgagagttcaagcatgctcttctgtgttaacagcgccagcatgagcggaggcaccatcagcccgatataccactgcgcccagagggagagcaggggtttattttcccgcgtaagggtaggctgattgcgataaatatggtcggaataggtggccagcagtgattgcagcttagacggttggcgccactctgagagcgtcatcgcgtgggacgggggcgcttcatcaagccggataaagtccagcaggtgggcacgcgtttccgcaatcttttcccgtatcgcatctgcaagcgaagcattcccactgatgagcggcgctcgccagaggagaggttcgacgatgtgtgcggtatgcgtggccatagtatagatagaaatctaaatgataatgattgccaatcctaactattgctcataccaatggcaagacttttgtcctggtgacctcgtcggtagggttatgccgtctgaatctcttcgcttagcagaatgttattgcgtcccatatgctttgcttcatagagggctttgtccgctttttccagcgcgccttccacgtcttcatcctcgaaaatggcgatgccaatgctgatagtgacgtttgtcgcgacgctttcgttaaacagatgcgggattttcaaatcatacactttctgacggatccgctcggccgtctggcgagcgtgttcgagtgaaatgttggtcagcagcaccataaactcttccccaccaaaacgcgccacaatatcgcgagaacgcacggcgtcgcggattgccgcagagacgcgcttcagcgcctggtcgcccatcatatggccgtaatggtcgttataggctttgaagtggtcgatatccatcagcaggacaaagtgttcgccattttctaccgtgggcagattctccagacggctttgcagaccgcgacgattatagagcccggtaagcgggtccatcatgctgaggtcggtaagggtttctcgttcttccagaaggcgagagagcagctcctgagcgaaacggtcgttgcgtctttgcaaaatgttatgaatagcaattgccaccacaggaagtgcgaaagaataggtcattcgcagccatatatcgtgatcgcttaaccacaggcagacaataaaggtgggcaatgaatgcagcgtaaacgctttgatattactggcgaacgccagcgtgccgataaaaagtactgttaaaagagcaattagcaaatatgtcgcatggtcctgagtaattaaggcgaatttggagacaatttgccaggcccacaaaataccgaagatacctgaaacgacaggaatatttatcttccgcgcgcgctttctccagtgccagacgaacaggccagtactgatggcgaaaatagcaatcagaggggcggaaaacaggcgtacagaattgagcggatttgttaccgagaacactgccgaagttgcgttcagaaataaaaataaacgtaacgataattgatattttctgtgaaccaaagaccgccaggattgtgatgtcatagtcgcgtgtttttattaaaatttaattaaaacagataaataggtgttatttcgcaataaaatatgcaaaaaactcaaagagtaattatcagaaaatctttagacgttgttaacaggtgcgcaatttatcaccttagacaattcctgtcattacgggaaaggtaaaggtcgatggattttgattcattcagctggcaaatgataatttttgttatatgatattggttatcattatcgttggtagagggaaaagcatgttgaacagagcgctgggcagtggttggggggtactgctaccgggagccattctcggcggtttgacgtttgccgatctctctctcgatacctggaaagtcatcatcgcgtcaggactgttagtcacgtcaggcatgatctggcataagcaactgcgtcactttgttttactgccatcctgtgtcgcgctggtcagcggaattctggtgatactgatgagtttgaaataacagggataaagaagaaattcagaggggttgtaagataattggtgcgaggggggggactcgaacccccacatccgtaaggacactaacacctgaagctagcgcgtctaccaattccgccaccttcgcacagtcatcttactctttattgctatgttgatatcgcctcgttggtgcgaggggggggactcgaacccccacatccgtaaggacactaacacctgaagctagcgcgtctaccaattccgccaccttcgcccagtgcgagcaatatcatcgtgatttatggtgcgaggggggggactcgaacccccacatccgtaaggacactaacacctgaagctagcgcgtctaccaattccgccaccttcgcataccatcgatactgtaaaagtatcgtaaccacggaggcgcattctagttgttttcagctttacgtcaacagaaaagtgcgcgtgatgccttgattgatgcaaaaatggccgatggacgcgccgtgtatagccggatggcgctttcgcttatccggcctacaggggaggcgattactttttggcctgacgcgtcatcacggtgcggtacaccttaaagcggccggtctgggcgataacttcgtggaagccaaaagtttcatccagcactttcgggtatgccaggaaggcgttcgcgacgatacgcagctcaccgccgctgttgaggtgacgaactgcgccacggatcaacgcttgtgccgcttccaggctggtctccataccgtcgtggaacggcgggttagagatgatcatgtcgaagcgaccggtgatgtcggagaagacgttgctggcaatgacttcgccttcaatgccgtttgcggcaagcgttgcgcggctggcttcaaccgccggggcgctcacgtcacacagggttaagcgcacttttggcgaatggctggcgagcacggtagagagcacgcccgcaccgcagcctacgtccagcactttgcctttggtgtgcggcgtcagggtggaaagcagcagcttgctgcccgtatccagcgcgtcacggctgaacacgcccggcagggttttgatggtcaggccgtcaagctggtactcgtcccagtatgcctgcgcatcaaacgttgtctgtttttccagacggccatggtacagaccacagcggcgagcgctgtcgactttattcagcggcgcgtagccttccagcagctgttccgcgctacgcacgccgctgcggttttcaccgaccacgaaaatatcgcagccgaccggcagcagggagagcaggttcatcagctggaactgggcttccggtttattcttcggccagtagtagatcagcgtgtcgcagtcggcgatatcgctctgctctgccaccaggctaaagcgcgcgcgctcgcccatctggcggctcagcacctgccagtggtggtagtattgcgtatgggcacggctttcagcacagtcgaaacgcgcgggcaggtcatcctgcatatctccggcaaacagaatacggctttcttcgaaatcatcactgtgacgcagcaagacttcacttgccggggtaaatgcagacatgaattgttcctcaataaactcaggcggggattatagtaggtagatggcgcactttcgacacatttgctatatttgcgcgcctgagagacaggagttttccctatgacatcccgacgagactggcagttgcagcagctgggcatcacccagtgggctttgcgtcgcccgacggcgttgcagggcgaaatcgccatctccataccggcgcacgttcgcctggtgatggtggcggaagaactgcctgccctgaatgaccccctgatcgatgatgtccttcgcagcctgaagctgacggccgaccaggttttaccgctgacgccagagcgtgtcgcgatgctgcctcctgatagccgctgtaacagctggcgtatcggagaggcaaatgagatctctcttcaggggagccagatctgctcgccagcgctggacgaactgaaagccaacccaaaagcgcgcagcgcgctatggcaacaaatctgcgaatatgaacacgatttcttccctcacgacgcctgacctgtccaccgcgttcgcgattgaaacacgcgcccacgcgtttccgtggagcgaaaaaaccttcgccagcaatcagggcgaacggtatctgaactaccgcctggacgttgacggcaccatggccgctttcgcgatcacgcaggttgttcttgatgaagcgacgctgtttaatatcgcggttgatcccgcgtttcagcgccgcgggctgggaagagaactgcttgagcatctcatccgtgagctcgaaacccgtgacgttttcaccctgtggctggaggtgcgcgcgtcgaatgtcgccgccatcgcactctatgaaagcttaggctttaacgaggcgacaatccgccgtaactactaccccaccgcagagggacgtgaagacgccatcataatggctctgccgattggataataaaaaataaggttgtaacgatgaaatgggactggattttctttgatgccgacgaaacgctgtttacgttcgactcgttcggcggcctgcagcggatgtttctcgactatagcgtaaccttcaccgctgaagattttcaggactatcaggcggtcaacaaaccgctgtgggtggattaccagaacggtgccatcaccgcgttacagcttcagcaccagcgctttgacgtctgggcggaacgcttaaaggtcagtccgggaacgctgaacgaggctttcctcaacgccatggccgatatttgtgcgcccctgccgggcgcggtttccctgctgaatgcgttgaaaggtaaggtgaaactggggatcatcaccaacggttttaccgccctgcagcagatccgccttgagcgcaccggtctgcgcgatcatttcgacgcgctggtgatctcggaagaggtgggcgtgccgaagccggatccgcgaattttcgactacgcgctggcgcaggctggcaatcccgaccgcgatcgtgtcctgatggtgggggataccgcagagtcagatattctgggcggcatgaaggctggtctgtcgaccgtctggctcaatgcgcatggccgcgtgaagcctgaaggcatcgagccgacctggaccgtgacgtcgttgaacgaactggagcaactcctgtgtaaacaatggttgcctgccccccgttgatgggtaaaatagccgcaattttgtattccatgatgcgtggcgtgctgccgcgcttataaaagaagatttaattatgacgttgtctccctatctccaagaggtggccaagcgccgcacttttgccattatctcgcacccggatgccggtaaaacgaccatcactgagaaggtgttgctgttcggacaggcgatccagactgcgggtaccgttaaaggccgtggctccagccagcatgcaaaatccgactggatggagatggaaaagcagcgtggtatttcgattaccacctccgtgatgcagttcccgtatcatgactgcctggtgaacctgctggacaccccgggccacgaagacttctccgaagatacctaccgtaccctgacggcggtggactgctgtctgatggtgatcgacgccgcgaaaggtgtagaagatcgtacccgtaagctgatggaagttacccgtctgcgcgatacgccgatcctcacctttatgaacaaactcgaccgtgacatccgcgatccgatggagctgatggatgaagtggaaaacgagctgaagatcgcctgtgcgcctatcacctggccgattggctgcggtaagctgttcaagggcgtttatcacctctataaagacgaaacctacctgtatcagaccggtaaaggccacaccattcaggaagtgcgcatcgtgaaaggtctggacaacccggatctggacgcggcggtcggcgaagagctggccgcgcagctgcgcgacgagctggagctggtcaagggcgcgtctcacgaattcgacaaagagctgttcctgagcggcgaaattaccccggtcttcttcggtaccgcactgggtaactttggcgttgaccacatgctcgacggtctggtggagtgggcgccgcagccgatgccgcgcaaaaccgacacccgtgaagtggaagcaaaagaagagaagttcaccggcttcgtatttaagattcaggccaacatggatccgaaacaccgtgaccgcgtggcctttatgcgcgtggtgtccggtaaatatgaaaagggcatgaagctgcgccaggtgcgtatcgggaaagacgttgtcatctccgacgcgctgacctttatggcaggtgatcgttcccacgttgaagaggcctatccgggcgacatcatcgggctgcacaaccacggcaccatccagatcggtgataccttcacccagggcgaaatgatgaagttcaccggtattccgaacttcgcgccggagctgttccgtcgtattcgtctgcgcgatccgcttaagcagaaacagctgctgaaaggcctggttcagctctccgaagagggcgccgtgcaggtgttccgcccgattgcgaacaacgatctgatcgtgggtgcggtcggcgtgctgcagtttgacgtggtcgttgcgcgcctgaagagcgaatacaacgtagaagcgatttacgaatcggtgaacgtcgcgaccgcgcgctgggttgagtgttctgacgtgaagaaattcgaagaatttaagcgtaagaatgaagttcagctggcgctggatggcggcgataacctgacctatatcgcgccaacgatggtcaacctgaacctgacgcaggaacgttatccggacgttcagttccgtaaaacccgcgagcactaatcccctctcagagcacggcattcgtcgtgctcttctttatttcctgtcttattaatcccttgcggaatgttcttaattcaacgcaatttcacgctattcgcccattttttacccaattctgaaagcggctctgtgagagtgatctatatttaactcagtgtttaataccgggcgtggataaattaactgttcaatgcatgactttaggttatccattttgctcgtgtgtttattcgcaatatatatcactactaaggaagtatgtagcccgaataacgggtcaacacaggaatagatcgatgaatatgacaagactgaagatttctaaaactctgctggctgtaacactgggtagcgttctggtgagcggctccgccctggcggaaagcagcaccatggataaagcacaatccacggccgatagcgcagggcaaaaaatcgatagctctatgaataaagtcggcaatttcatggatgacagctctatcacagcaaaagtgaaggccgcactggtggatgatgaagccatcaagagcaccgatatttccgttaagaccgacaagaaagtggtcacgctgagcggctttgttgaaagccaggctcaggctgaacaggcggtgaaagtggcgaaaggcgtcgaaggcgtcgcctccgtcagcgataagctgcacgtccgtgacggcaaaaacgcgtcggtgaaaggttatgccggtgatgcagccaccaccagcgaaatcaaagctaaacttttagcagatgacatcgtgccgtcccgtaaggtgaaagtggaaaccaccgatggcgtggttcagctttccggtacggtagattcgcaggcgcaaagtgaacgtgccgagtccatcgcgaaggcgattgatggtgtgaaaagcgttaaaaacgatctgaaaacgaagtaaatctcgaccattcgcccgtctggctaaaccctgcgggcgaaataagaacgactctggaaaaacgccggtgagtgacctgagcgctcacgtttagcggccgacattaactatggtaaaggagaagcttatgtttcgttggggcattatatttctggttatcgcgttaattgccgccgcattgggctttggtggactggcaggtacagcggcatgggcagctaaaattgtcttcgttgtgggtattattctgttcctggtcagcctgtttacagggcgtcgacgtccatagcaaacgcaatattccgtcaacaaaataaagccagtcactgtgactggctttttcttatttgcgtaacaggtcgggtgcgttactgtggtgttataaaataatcaaaacaggaaagcagaggtggggcaacgaattcccgttacgctcggcaacattgcgccgctgacgttaaaaccgtttcgcgcgggtcaactcgcgctggtctgcgagggtggcggacagcgcggcattttcaccgctggcgtgctggacgaatttatgcgcgcgcagttcaacccctttgacctttacttcggcacctctgccggggcgcagaacctctctgcctatgtctgtaaccagcccggctacgcgcgaaaggtcatcatgcgctacaccacggcgaaagaattttttaacccggtgcggtttgtgcgcggcggcaacctgatcgatctcgactggctgctggagtcaacctccagccagatgccgctggccatggatactgccgcccgtctgtttgatagcggtaaagaattctggatgtgcgccagccggggcgatgactattccccgggctatttttcgcctcagaaagagaactggctggacatcatccgcgcctccagcgcgatccccggcttttatcgtaccggcgccctgctggacggtattagctatctggacggggggatcagtgacgcggtgccggtgcaggaagccgcccgtcgcggggcgaaaaccattgtggtgatccgtaccgtaccgtcgcaaatgtattacaccccgcagtggtttaagcggatggagcgctggctgggcgacagcagcctgcagccgctggtgaacatcgcgaagcagcatgaaaccacctacggcgcgatgcagcgcttcattgagaaaccgccgggcaagctgcgtatttttgaaatttatccgcctaagccgctgctgagcatggcgctgggcagccgcgttcctgcgctgcgtatggattacaaaacggggcggctgtgtgggcgctacttcctggcgacggtggggaaaatgctggcggagcagccgccgcttcatcgccataaacgcattattacgccgcctgcgattgtcgccaacgacgccctgacggtgcccctggttgacattccgcaggcgaatgacgctttactggataacgaggatctggcgtgatgcaccgctttgtcgatacccattgccactttgatttcccgccgtttacgggagatgaagagcaaagcattgcgaaagcggccgaggcaggcgttcaggccattattgcgccttcagtggaagcggcttacttttcccgggtgctggatcttgctgcacagcaccccgcgctctatgcggcgctcggcctgcatccgatcgtgattgagcggcatcgggatgaggacattgagcgacttgatgagatagtgcagaccgcaggcgacaagcttgtcgccatcggtgagatcggcctcgatctttatcgcgaggagccgcattttgagcgccagcagacgatcctcgacgcgcagctcaggctggcgaagcgtcacgatctgccggtgatccttcattcgagacgcacgcacgataagctggcaatgcacctgaagcgtatcgatttgccgcgtaagggcgtcgtgcatggtttctcaggcagcctgcagcaggcgcagcgttttatcgagctgggctataaaattggtgtgggtggcaccatcacctatccgcgcgccagtaaaacccgggacgtgatggcacagctgccgctgtcggcgcttctgctggaaactgacgcgccggatatgccgctgaacggttttcagggccagccgaatcgcccggaacaggcggcgcgcgtgttcacagccctgtgtgaactgcgaaaagagcctgaagaggtgattgccggtgcgctgctggaaaatacgcagtcggtatttggcatcacgctatagataaagcgccggacggatcaccgttatcttctgtttttccagcgcccgcgccagcggttcaacgtcttccggcgtggcgctgcgccatgacgccgcctcgccgtacacgccatgcgcatgaaacgcgttgatgcggaccggcacattcccaagcccgtggataaaggttgtcagcggcttcaggtgctccagataatcacactgccccggaatcaccagcaggcggagctctgtcaaacggtggcgttctgccagccagcggatactctgcttgatctgcgggttttcgcgcccggtcaggaagcggtggtgttcgttcccccatgctttcaggtccagcatcgcgccatccagtaccggcagcagcttttgccagccggtttcgcttaacaaaccgttgctgtcgaccaggcaggtcagatgattcaggtcgggatcggctttgatcgcggtgaacagcgtcactaaaaacggtaattgcgttgtggcctcaccgccgctcacggtgatcccctcgataaacggtgcggatttgcggatctgtgaaaggatctcctcctcgctcaggcggtgcgccataggcgttgcctgctgctggcacaggtgcaggcaggtgtcgcactgctggcagtcactctcctgccaccagacgcgtcccgcctgtatggtcagtgcgtcgtgcgggcagtggggcacgcagtccccgcagtcgttgcagcggccgatcgtccacgggttgtggcaggttttacagcgcaggttgcagccctgcaggaacagggccaggcggctgcccggcccgtccacgcaggaaaaagggatgacctgactaactaaagcgcatctgctgttcatggcttatcacgcgcggctgacgttccagaatacgggtattgcgcgcggcttcttcacccagccaggtggtattggtgcgcgatccggcttcccggtacttctccagatccgacaaccgcaccatataaccggtaacgcgcaccagatcgttacccgcgacgttggcggtaaactcgcgcatccccgccctgaacgcgccgagacagagctggaccaccgcctgcgggttacgttttaccgtctcatccagcgtcaaaatatcgctgatcccggaagcgtagtgcttgtggtgcggcgccaccgccagcaggtggctgatgggatccggctcgtcgccgtagggcaggcgcgcgcccggcgtggtgcccgaatcggagctgatccccgactgcgcatgcagcatcgcgcgctgcttccagccgtgtttcaccggcgtgttttcgacaaacgccgcaagctgttcgctgatgcgatagcccagcgcgttggcctgctcgtctttgccgtaacgcccagtcatcccggctttctcacagagcacgtttaccgcttctgccaggccgtacatgccaaacatcggcacaaaccgatcggcatcaatcagcccctctttcaccaggaagctattctcaaagaagccggattgttgatacaggaaatcgcagcgggcatcgatgatggccatttgctgctggcagtaatgcgggagggcgcggctgaagaagtcttccattgacgtactgtgttcggcgatggccttgaggttgaggcgcaccagggtgctgccaccgcctgccagaggcagggagttgtaacagctcactacgccgtaatggccttttgtgaaaattttatcattcaccgggccattagaaatatgcggtttgctgcattcacatatgtttttcgccacctcaagcagcaaatcatccggggtgatcgctggatcataaataaaggtcaggttcggcgcgacctgcttcagctctgcatcggcacgcagaatggcacgggtaatgggcgtatcttccggcccgatattggcatgcataaaggcatccggcagcgtacggtcgagatagcgccagaaacgttttattcggctattgatttcttcttgtgttagaattctaacataaggttgcagcaacgcatcaagctgaccgagatagaccggcatcgatgtgacggacggaacatggtggtagaggatggttaacagtgagagggcgtcgtcgagatcttttgccccttccagctccagccattctgaaccattagccagaaattttgcgtaatccggcagaacgtaacggggtttgtaaggcgcatggccttcgaacatgtcgcagatgaatccctcgtccagcgcggcgcgcgcagcttcaggaagtgccggatacggcaggttgttttccgcttccagcgccagaaaatgacgtttttgttccggggataacgccgggcttgtcacaatctgctggcaacgttgttgcagggcgtcggggctggagtgggacatgttcgcttccttgagtgttctgcggatgatgaacggattgtagaaagcctgcctgtcggcacttttgatccgacagggggtatcgctgctttagtcggcaatgtgcacgctaaagtttgaagaagatctcattacagtaatgcaaatttgcacgcagttttcattaactgtgatgaatgtcgaagtgtggatgcgggtggatgttagaatactcacagacccgcaaggtaaaatttatacggcactgccgttggagaatgttatgaccgatttaactgcaagcagcctgcgcgcgttgaaactgatggacctgactaccctgaacgatgacgacaccaatgagaaagtcatcgccctgtgccatcaggcgaaaacgccggtgggcaacaccgcagccgtctgtatctacccgcgctttatcccgattgcccgtaagacgctgaaagagcagggcaccccggacgtgcgcattgcaaccgtcactaacttcccgcatggcaacgatgatatcgagattgcgctggcagaaacccgcgcggcgattgcctacggtgcagacgaagttgacgtggtgttcccgtaccgcgcgctgatcgccggcaacgagcaggtcggttttgacctggtgaaggcctgtaaagacgcgtgtgcggcggcaaacgtgctgctgaaagtgatcatcgaaaccggcgagctgaaagaagaggcgctgattcgtaaagcctctgaaatctccatcaaagccggtgcggatttcattaaaacctctaccggtaaagtaccggtaaatgcgaccccggaaagcgcgcgcatcatgatggaagtgatccgcgacatgggcgtgtccaaaaccgtgggcttcaaacctgcgggcggcgtgcgtaccgcggaagacgcgcagcagttcctggcgattgccgacgagctgttcggcgccgactgggccgattcccgtcactaccgcttcggcgcctccagcctgctggccagcctgctgaaagcgctgggtcacggcgacggtaagagcgcaagcagctactaagtttgaattgccggatggcgccacgcttacccggcctacccggatcgtggtcgggtaaaccgtacccgccaccattcacccgattcctcatgggggttaccgtgtttctcgcacaagaaattattcgtaaaaaacgtgatggtcatgcattaagcgacgaagagatccgcttcttcatcaacggcattcgtgataacaccgtctcagaagggcagattgcggctctggcgatgaccattttcttccacgatatgtcgatgcctgagcgcgtgtcgctgaccatggcgatgcgagattcaggaaccgttctggactggaaaagcctcaaccttaacggcccgattgtggataaacactccaccggcggcgtgggcgacgtgacctccctgatgcttggccccatggtggcagcctgtggcggttatatcccgatgatctccgggcgcggcctgggccacaccggcggtacgctcgacaaactggaagccattccgggcttcgatatcttcccggatgacaaccgcttccgcgacattattaaagacgttggtgtggcgattatcggccagaccagctctcttgctccggcagacaagcgtttctacgcgacccgcgacatcaccgcgaccgttgactccatcccgctgatcaccgcctctatcctggcgaagaagctggcagaagggctggacgcgctggtgatggacgtgaaggtaggcagcggcgcgtttatgccaacctatgaactctctgaggcgctggccgaagcgatcgttggcgtctccaacggcgcgggcgtgcgcactaccgcactgctcaccgacatgaaccaggtgctggcttccagcgccggtaacgccgtcgaagtgcgtgaagccgtccagttcctgacgggggaataccgcaacccgcgtctgttcgacgtcaccatggcgctgtgcgtggagatgttaatctccggcaagctggccaaagacgacgccgacgcccgcgcgaagctacaggcggtactggacaacggcaaagcggcggagatctttggccgcatggttgcggcgcagaaaggcccaaccgacttcgtcgaaaattacgcgaagtacctgccgaccgcgacgctcagcaaagcggtgtatgccgacagcgaagggtttgtctcggcaatggatacccgcgcgctgggtatggcggtcgtgtctatgggcggcggccgtcgtcaggcgtcagataccattgattacagcgtcggcttcaccgatatggcccgtctgggcgacagcgttgacggccaacgtccgctggcggtgatccacgccaaagatgaagccagctggcaggaagcggcgaaagcggtgaaggcggctattacgcttgacaataaagcaccggaaaccacaccgactgtctatcgccgtatcaccgaatagcggtatactgatctgatcgataatttttgaagcactacgtacggagaacaattatgaaacgtgcatttattatggtgctggactcattcggcatcggcgcaaccgaagatgcggaacgttttggtgacgtgggttccgataccatgggtcacatcgcggaagcctgtgcgaaaggcgaagcggacaacggtcgtaaaggccctctgactctacctaacctgacccgccttgggctggtgaaagcgcatgaaggctctaccggtaaaatcgcagccggtatggacggcaacgcggaagtggtgggcgcttacgcctgggcgcacgagctctcctccggtaaagacaccccgtctggacactgggaaatcgccggtgtgccggtgctgttcgactggggttacttctccgatcacgagaacagcttcccgcaggagctgctcgataagctggtgaagcgtgccaacctgccgggttacctcggcaactgccactcctccggtaccgtgattcttgaccagctcggcgaagagcatatgaaaaccggcaagccgattttctacacttctgctgactccgtgttccagattgcctgccacgaagagacctttggcctggataaactctacgagctgtgcgaaatcgcccgtgaagagctgaccgaaggcggctacaacattggccgcgtgatcgcgcgtccgtttattggtgacaaagcgggtaacttccagcgtaccggtaaccgtcacgatctggccgttgagccgccggcgccaaccgtgctgcagaagctggttgatgagaaaggcggtcacgtggtttctgtaggtaaaatcgcggatatctacgctaactgcggcatcaccaaaaaggtcaaagcgaccggactcgatgcgctgttcgatgccaccatcaaagagatgaaagaagcgggcgacaagaccattgtcttcaccaacttcgtcgacttcgactcctcctggggtcaccgtcgcgacgtagcgggttatgctgcgggtcttgagctgttcgaccgccgcctgccggagctgatggagctggtgggtgaagatgacattctgatcctgaccgcggaccacggctgcgatccaacctggaccggtaccgatcacacccgtgagcacattccggtgctggtgtacggcccgaaagtgaagccgggttcgctgggtcaccgtgaaaccttcgcggacattggccagaccctggcaaaatactttggtacgtctgacatggaatatggcaaggccatgttctgatgtcattgcccggtggcgcttcgcttaccgggcctacggttttgtaggccgggtaaggcgtagccgccacccggcaaaaacaacaagttaaaaggaactgaagatggcaactcctcacattaatgcagaaatgggtgatttcgctgacgtcgtattgatgccgggcgacccgctgcgcgcgaagcacattgcagaaaccttcctggaagacgtgcgtgaagtgaacaacgttcgcggcatgctgggcttcacgggtacttataaaggccgcaaaatctccgttatgggccacggcatgggtatcccatcctgctccatctacaccaaagagctgatcaccgatttcggtgtgaagaaaatcatccgcgtaggctcctgcggtgcggtgcgtatggacgttaagctgcgtgacgtggtgatcggcatgggcgcgtgtaccgactctaaagtcaaccgcatccgctttaaggatcatgactttgcggccatcgctgactttgacatggtgcgtaacgcggttgacgcggcaaaagcgctgggcgttgacgcgcgcgtgggcaacctgttctctgccgatctgttctactcgccagaaggcgacatgttcgacgtgatggaaaaatacggcatcctgggcgtggaaatggaagcggccggtatctacggcgtagcggctgaattcggtgcgaaagcgctgaccatctgcaccgtatctgaccatatccgtacccacgagcagactaccgctgccgagcgtcagaccaccttcaacgacatgatcaaaatcgcgctggaatccgttctgctgggcgataaagagtaattctgtctcttccctccctctccctgtgggagagggctggggtgaggacaccagctagcgcacggcctgcgcaatccacgctgacagctcccgcagctcattttcctgctccgggaaatccccaattaacgcgtcacattcctgctgcagcatatccgcccggtacaaacagccctgcaagcgtgccgcaagggcttccagtggccccggattcagactgtccgtaaacacctgcgtgcgggtgatatgacctttctcgacgtcaaaatgcagctccacgccgccccaggtaaaacgctcatccagcagatgggaaaatgcaggtgcctgaccgaagttccactcccagctgctctggcgggcgaaggtttccgcgaagtttggcaggtccggggttttgtccggtgaaatcacttctgcttccacgcgctcgccgtaatgcgcaaagaacgcctcgcgcacggcctcacagatttgctcgtgtgtaacgcccggcagcagttcgaccagatttgccacgcggccgcgcacggaggtaatccctttggcctggagttttttcttgtcgggattcaggtagttcgccaggcggctcagatcggcgttaagaagcagagtgccgtggtggaacccgcgatccatcgtttcgcgataggcggagccggacactttgcgatctccgtcgggcgttttgaccaccagatcgttacgtccggaggcttccgccgtcacgccgagcgaattgagcgcgttgaggacgatggacgttgagatggttttgtcgtattccggtttgcccgccataaaggtaaagcaggtattgcccagatcgtggaataccgcgccgccgccgctgctgcggcgcgccagacggacgttgtcctcttccatacggcgggtgttgcactctttccacgggttttgcgcacgaccaataaccaccgtatcggcattgcgccagagaaacagtacgcgctgggtggcaggcatctggcggaagatgcactcctccaccgccaggttaaaccagggatcgtaagagtcagagataagcaggcgtaacgtcgacatggcagagttccttttccgaatcattcgcctactttatcactattctttcttctcgctctcttcgtcttcggggactgaccggctggcggtcagcaggaacggggattgctgccagcgcgtgcgcttgccgcgaagcagggtacgcgccagcacaacgccgatggcgagtgaaagcagcagcatcaggcgcagaatattggtggtattatcgacctgtttagcttcagtgggcagggtgtgggtatcaagggtgaggcgcaaatagcccagcgggccattcttcccctgaataggttcaacaagctgctggttgaagtagccgccggcttttttgccgtccagcgccagcctgtctcgcacgtcgacgtgttcacccgcacgggcaatcaggttgccttgctcatcatagacaccggcatcaagaatgcggctgttctccgtgagcaggcgtaaaacctggcctatccgcttctcgtcaggcgtttcgttacgcatggacggcgcgacgttgagcgtgacctggcgtgccagcgtgcgagccagctcttcaaactgcgggttgcgttgccgttgatggttctggctaaaccacgatgccccttgcatcagcaccactaagagtgcgagacaggaaaggacaatcacggcgcgatggagccggaatttcagttttgcgcgagccatattccacctgctgaaaatttacggcttaatgttgccagaagtgatggttacagggtagcctcatgcgttattttccctctgcaaccttccggcgcgaacgaaattacaggagctttaatgccgaacattacctggtgtgacctgccaacggatgtctctttatggccaggattgccgctctctttaagtggcgatgaggtgatgcctctggattaccacgccggtcgtagcggctggctgctgtatggacgcggtctggataagcaacgcctgacccagtatcaaaccaaactgggggccgcgatggtcatcgtcgccgcctggtgcgtggaagactaccaggtcattcgcctggcgggctctctgacccagcgcgccacgcgcctggcgcatgacgccgggctggatgtcgcaccgctgggtaaaattccgcacatgaaaacgcctggcctgctggtcatggacatggactctaccgccattcagatcgagtgtatcgacgaaattgcgaagctggcgggcagcggcgagctggtggctgaagtcaccgagcgtgcgatgcgcggcgagctggatttcaccgccagcctgcgacagcgcgtggcgaccctgaaaggggccgatgccaacattctgcgtcaggtgcgcgatgaactgcccctgatgccagggctgacgcagctggtgctgaagctgcagtccctcggctggaaggtggcgatcgcctccggtggcttcaccttcttcgcggattatctgcgggaaaaactgcatctgaccaccgtggtggccaacgagctggagatcatggacggcaagctgaccggccaggtgatcggcgatattgtggatgcccagtacaaagccaatacgctgacgcgcctcgcggaaaaatatgaaattccggttgtccagaccgtcgccatcggggacggcgcgaacgacctgccgatgatcaaagcggccggcctgggcattgcctaccatgccaagccaaaagtgaatgaaaagacggaagtgactatccgtcacgctgacctgatgggggtgttctgcattctctccggcagccttaatcagaaataacggtctgctttgtaggccgggtaagcgtaagcgccacccggctcgcaggccgcagagaaataacgaggtaaaccgtggcgaaagctccaaaacgcgcatttgtctgtaatgaatgtggtgcggattatccgcgctggcaggggcaatgtagcgcctgccatgcctggaacaccatcaccgaagtgcgtggtgtggcggcttcgccgagcgtggcgcgcaacgagcgcctgagcggctatgcgggcaatgcgggcgtgtcgaaggtacaaaaactttcagacatcagcctggaggcgctgccgcgcttctccaccggcttcaaggaatttgaccgcgtgctcggcggcggcgtggtgccgggcagcgcgatcctgatcggcggtaacccgggcgcgggtaaatcgactctgctgctgcaaacgctttgcaagctcgccgaacagatgaaaaccctgtacgtcacgggcgaagaatcactccagcaggtggcgatgcgcgcgcaccgcctgggcctgccgaccggcaacctgaatatgctgtcggaaaccagcatcgagcagatctgcatgatcgccgaagaagagcagccgaagctgatggtgatcgactccatccaggtgatgcacatggcggacatccagtcctcgccgggcagcgtcgcgcaggtgcgtgaaaccgcggcctacctgacgcgctttgccaaaacgcgcggcgtggcgattgtgatggtcggccacgtgaccaaagacggctcgctggcgggaccgaaggtgcttgaacactgtatcgactgctccgtgatgctcgacggcgacgcggactctcgcttccgtaccctgcgcagccataaaaaccgctttggggcggtgaatgagctaggcgtctttgccatgaccgaacaggggctgcgcgaagtcagcaacccgtcggccatcttcctgagccggggagatgagatcacctccggcagttcggtgatggtgctgtgggaagggacgcgcccgctgctcgtcgaaattcaggcgctggtggatcactcgatgatgggcaacccgcggcgcgtggcggtcggtctggaacagaaccgcctggcaatcctgctggcggtgctgcaccgtcacggcgggctgcagatggcggatcaggacgtcttcgtgaacgtggtcggcggcgtcaaagtcaccgagaccagcgcagacctggcgctgctgctggcgatggtctccagcctgcgcgacagaccactgccgcaggatctggtcgtctttggcgaagtgggccttgccggggaaatccgtccggtgccgagtgggcaggagcgaatctccgaggcggcaaaacacggtttccgtcgtgcgatcgttcccgccgccaacgtgccgaaaaaaatcccggaagggatgcaggtttttggcgtgaagaaactcgcagatgcgttaaatgtctttgacgacttataattacgtattcgattttgcaggaggcaccgtaatttatgtcatcatttgactacatcaagaccgctatccgccagaaaggctgcacgttgcagcaggtggcggacgccagcggcatgaccaagggttatctgagccagctgctgaacgccaaaatcaaaagccccagcgcgcagaagctggaagcgctgcaccgctttctggggctggaattcccgcgtatgcaaaagaacatcggcgtggtgttcggcaagttttacccgctacataccgggcatatctatctgatccagcgcgcctgtagccaggtggacgagctgcacatcatcatggggtacgacgaaacccgcgatcgtcagctgtttgaagacagcgccatgtcgcagcagccgaccgtgccggaccgtctgcgctggctgcttcagaccttcaagtaccagaaaaacattcgcattcacgcctttaacgaagagggtatggagccgtacccgcacggctgggacgtgtggagcaacggcatcaaagcgtttatggaagagaagggcattgcgcctaactggatctacacctctgaagagtccgacgcgccgcagttccgcgagcatctgggcatcgagacggtgctgatcgacccgaaacgcacctttatgaacatcagcggggcgcagatccgcgaaaacccgttccgctactgggattacatcccgaccgaggtgaagccgttcttcgtgcgcacggtggctattctgggcggcgagtcgagcggtaaatcaacgctggtcaacaagctcgctaacatcttcaacacgaccagcgcgtgggagtacggccgcgactatgtcttctcgcacctgggcggcgacgagatggcgctgcagtattccgactacgacaaaatcgcgctcggtcacgctcagtacattgatttcgcggtgaaatacgccaacaaggtggcgttcatcgataccgattttgtcaccacccaggcgttctgcaaaaaatacgaagggcgcgagcacccgttcgtgcaggcgctgattgacgaatatcgctttgacctggtgatcctgctggaaaacaacaccccgtgggtggccgacggcatgcgcagcctcggcagctcggtggacaggcgggaattccagtccatgctggtggagatgctcaacgaaaacaacgttgagtttgtgcacgttgaagagtcagactacgactcccgtttcctgcgctgcgtcgaactggtgaaggagatgatgggggagcaggggtaagcgttaaccgccctctccctttgggagagggccggagtgagggaatcagtccactcagaactcaaccaccactttcccacgcatatgcccgtccagcaccttgcggtgcgcctcggtaatgttttccacgctcagcccgcgcagcgtttcactcagtgagctttccaccacgccgttatccaccagcttcgccacctcattgaggatctcaccctgacgcgccatatcagcggtctggtacatgctgcgggtgtacataaattcccagtgcagggcggcggatttcgacttcagcttgtccaggttcagcgggtgttcattctccacgatagaacagatatgcccctgcggtgcaatcaggtcgctgaccgcagcccagtgcccgtcggtgtcgttgaggatgaaaatgtaatccacaaaggtcagcccgtgcttcgccagttcgcctttcagatcgcggtagttcaccaccacatctgcaccgcgatcgcggcaccaccgggcggaatcttctcgggacgcggttgcgatcacctttaccttgctgttgtgcttcgcaaacgggatcgccagcgatcccaccccgcccgcaccgccgatgatcagcagggttttgtccgtaccggcatcctgaatattcagccgttcaaacaggccttcccacgctgtgagcgcggtcaacggcagcgcggcggcagccgcccagccgaggcttgacggtttgtgcccgacaatgcgcgcatcgatcagctgatgcgtagcgttgctgcccggacgggtgatgtcgcctgcgtaccacacttcatctcccggtttgaatccggtcacgccagccccaacgtctttgacgatcccgctggcatcccatccgagaatacgcggctcgttcagcccgttcttagcaatgcccgcgtggactttggtatcgaccgggttaacggagacggctttcacctccaccagcagatcgtgctcgccgggctgcggcatcggcggggtgatttcaatgaaggtggcggggttttcagggttaacggcgatggctttaactgacatggtgtgctcctcaatggcatgcgttttgttgaggctagtctattaagtggccatctgcgtgataagatggacaattaagaactcagcgttcgtacaggatgaacaatcatgtttaaacagctgcaggatatggcgctattcgcgctggtggccgagatgggcagctttaccgcggcagcccagaaggcggagctgccaaaatccagcgtgagccagcggattagccagctggagcagcaggtgggcattcgcctgcttaaccgcaccacgcgcaggctgaacctgacgtttgcgggcgagcactatctggtgcactgccgtgaaatgctggcggccagcgagcgggcggagtacgccatccagcgcctgcgcgaaaaccccagcgggcggctgcgcatcacctgcccggcggggattggcgcgacgctgctggcgcatatgaatgccgagttccagcttcgctatcccgaggtttcgctggacgtgtcgatctctgatgacgtggtggatctggttgaggccggctttgacgtggcgctgcgtaccggcaagccgcaggactcctccctgattggccgcatgatcgggcactgcccgcgctacatgctggcctcgccggactatctggtgcgccgtgggctgctaacgcatccccgtcagctggtggagcaccgcagcattacgcacagagcctggtcggagtggcttctgcgaagcgagagcgaggattaccgctacctgccggataacgcgcacatgaccgataacctggtatacgcccgcgaatgtgcgattgccggtgcggggattacgctccttccggcttttttgctggaagataaggtcgagaaaggggcgctggtgcaggtactgccggagtggaacgttgaaggcaacgacctctggctggcctatccgagccgtaagctcaactcacccgcgctgatgagctatatcgactttgcaatgcagtttgatgaggtgaagcggtattacgtgggtaaataaaaaagccgggtggcggcttcgccttacccggcctacaaacagcgcagaaccgtaggccgggtaagcgtgagcgccacccggcttttgggcacttacttagaaatacgcttgtacttaatacgcttcggctccagcgcgtcggcgcccagcgtgcgtttcttgtactcttcgtattcggtgaagttaccttcgaagaactccactttaccttcatcctggtagtccagaatgtgggtcgcgatacggtcgaggaaccagcggtcgtgcgagataaccatcgcacagcccgggaactccagcagggcgttttccagcgcgcgcagggtttcgatatccaggtcgtttgttggttcatcgagcagcagtacgttaccgcccacctgcagcagcttcgccaggtgcagacgtccgcgctcgccgccggacagctcgcccacgcgtttgccctggtcggtgcctttgaagttaaagcggccaacgtaggcgcggcttggcatctcggtgttgccgatacgcatgatatccagaccgccggagacttcttcccacacggttttgctgttatccatcgcgtcgcggaactggtcaacggaggccagcttcacggtctcacccagggtgatagagccgctgtctggctgttcctgaccggacatcatgcggaacagggtcgatttacccgcgccgttcggaccgatgatgcccacgatagcgcctttcggtacggagaaggtcagatcgtcgatcagcacgcggtcgccgtaggacttacgcaggttggtcacttcaaccactttatcccccagacgcgctccaggtggaataaacagttcgttggtttcgttacgtttctggtattcggtgttgttcagctcttcgaagcgtgccagacgggctttgcccttagactgacggcctttcgtgccctgacgcacccactccagctctttctcgatagacttacggcgcgccgcttcctgagacgcttcctgagccagacgctgatctttctgctccagccaggaggagtagttgccttcccacggaataccttcaccgcggtccagctccaggatccagccggcgacgttatcgaggaagtaacggtcgtgggtaatcgccacaacggtaccttcgaagtcgtgcaggaagcgctccagccatgccacggattccgcatccaggtggttagtcggttcgtcgagcagcagcatgtctggtttttccagcagcaggcggcacagcgccacgcggcggcgttcacccccggagaggttcgcgatttttgcatcccagtccggcagacgcagggcatccgccgcgcgctccagctgcacgttcaggttgtgaccgtcgtgcgcctgaatgatctcttcatacttgccctgctgtgcggccagcttgtcgaagtccgcatccggttcggcgtatttggcatacacttcatcgagacctttcagggcgttaaccacttcggataccgcttcttctacggattcgcgaacggtgtgttccgggttcagctgaggttcctgcggcaggtagccaatcttgatgccaggctgcggacgggcttcaccttcgatgtctgtatcaatgccggccatgatgcgcagcagggtggacttaccggcaccgttgagacccagaacaccgatttttgcgcccgggaagaagctcagcgagatatttttaagaatatgacgtttcggcgggacaactttgccgacacgatgcatggtataaacgaattgagccacgttggacttcgcctcttttatcgtaatgagaaggaatttcagcctcgaagtgtagcctttttcccgccctaatcccagccaggaacgtcgggagtgttaaaacgcgcaagaaaggtaaaaaagtgtccatgacgtggcgcgttgcaggatgcctggttagcataagttaatgagactttgacgtggcaagacgctgcaattgacgaaaaaacaatgaggaagagcttgtggaaaaagccaaacgggtggtctggcgtctgctggctgccagcgtatgcgtaatggcggtaagccaggcggtgcatgccgattcactggatgaacaacgtagccggtatgcccagattaagcaggcatgggacaacaagcagatggataccgtgcaggcgctgatgccgacgctcaaggattatccgctgtatccgtatctggagtatcgtcaaattacggacgatctcatgaaccagcccaccgttaccgtgaataacttcattcaggcgaacccgaccctgccgccagcccggaatcttcagtctcgttttgtgaacgaactggcgcgacgtgaagactggcgcgggctgctggcgtttagccctgaaaagccgaataccaccgaagcgcagtgtaactactactacgcaaaatgggcgaccggccagcaggaagaggcctgggccggggcgaaagagctctggctgaccgggaaaaaccagccgaacgcctgtgattccctgttcggcgcgtggcgtgcttccggcaagcaggatccgctgtcctacctcgagcgtatccgcctggcgatgaaagccggtaatacgcgtctggtgactgcgctggcggggcagatgccgtccgattaccagactatctccacggcagttatctcgctggcaaacgatcccaacagcgtcctgacctttgcccgcagtacgggcgcgaccgattttacccgccagatggcggcggtggcttttgccagcgtggcgcgtgacgatgtggaaaacgcgcggctgatgatcccgcagctggtgcaggcgcagcagcttaatgaggagcaaacgcaggagctgcgcgatatcgtggcgtggcgactgatgggcaccgatgtgaccgacgagcaggcgcgctggcgagacgatgccattatgcgttcgaactccacgtcgctggtggaacgccgcgtgcgcatggcgctgggcacgggcgatcgccgtgggctgaatacctggctcgcgcggttgcctatggaggccaaggagaaagacgaatggcgctactggcaggccgatctgctgctggagcgcggtcgtgatgatgaggccaaagaaattcttcatacgctgatgcagcagcgcgggttctacccgatggcggccgcgcagcgcctgggcgaggagtacaccttccgcatcgataaagcgcccgctaacgcgaatccggcgctgacccaggggccagaaatggcgcgcgttcgcgagctgatgtactggaatatggacaacaccgcgcgcagcgagtgggcgaatctggtgaccagccgcactaccgatgaaaaagctcagcttgcccgctatgcgtttgataaccactggtgggatctgagcgtgcaggcgacgatcgccggtaagctgtgggatcatctcgaagagcgtttcccgctggcttacaaggatctgttcgatcgctacaccagcggcaaagatatcccgcaaagttacgcgatggcgattgcccgtcaggaaagcgcctggaacccgaaagtccgttccccggtgggcgccagcggcctgatgcagatcatgccgggcacggcgacgcacacggtgaagatgtttaacatccctggatacagtagcccgtcacagcttctcgatccggataccaacatcaacatcggtaccagctacctgcagtatgtgtaccagcagttcggcaacaaccgcatcttctcgtcggcggcatacaacgcggggccgggtcgcgtgcgcacctggctcggcaacagcgccggacgcatcgacgccgtggcgtttgtcgagagcatcccgttctcggaaacgcgcggctacgtgaagaacgtgctggcttatgacgcctactatcgctacttcatggggcagaaagataccctgatgagcgatgccgagtggcagagacgttactgatcggcgtgggttgtgttatgctgtactcgctaaagagtacaagaggcagcataacatgacccagcattccccgtattcctcggcaatggccgaacaacgtcatcaggagtggcttcgttttgtggagctgcttcgccagtcttacgagcaggatttgcatttacccctgatgcagctaatgctcacgccagacgagcgtgaggcgctgggcacgcgcgtgcgcatcattgaagagctgctgcgcggcgagatgagccagcgcgagctgaaaaatgagctcggcgcgggcattgcgacgattacccgcggatcgaacagcctgaagtcggcgcccgttgagctgcgccagtggctggaagcggtgttgttgaaaaacgcctaacgatagatcgcgttatggaacgggcttaacgccaggatcaccgcctggtgataaacgcctgaacgcgtcagcgcaccggcggtaaagacgccaatcgctccttctttacggccaatctcatcaatgccggtgtactgcgacatcaccggcccgagcgcttcacccgcacgcactttttccagaatgatctccggcaggggcagggtggccgaacgcgcttcgccgcgctgttcacggctttcgatcaccacccagctaaaggttgcaccttcgtcgataccggcttcaatcgccacccaaaagtccgcatccggggccgcagctctggcatttgccacgcgatttcgtgcgccagcgcgcgtttcctcgctgccaaacggctgttcaggaacgccactctcgacgccgatggcctcaatatggcaggatcccgcgccgaagatctcgtcaaatgcccttagaattgcctgaattttggcaggattagtggtagcagagacaacatggtgcataattaagctcgattcaaaaaaaactcatcgcagtataacggaaaaaaagcatgttacaggtataccttgttcgccacggtgaaacgcagtggaacgccgagcgacgtattcaaggccagtcagacagtcctctcactgagaagggtgtgcagcaagcgtggcaggtggcggaacgcgccagaacgctgggcattacccacgtgattaccagcgacttaggtcgcacacagcagacggcgcgcatcatcgcagacgcctgcggctgtgacgtcatgcttgagccgcgcctgcgcgagctggatatgggcgtgctggaaaaacggcatatcgatacgctgacggaaacggaagagggctggcgccgcacgctggtgaacggtaccgaagatggccgtattcctgagggcgaatccatgcaggagctcagcgtacgtatgcatgccgccctggcggaatgcctgaagctcccggcaggaagccgtccgctgctggtgagtcatgggattgcgttgggatgcctggtgagcaccattctgggactaccggcttacgctgagcgccgtttgcgtctgcgcaactgctctatttcccgaattgattatcaggagagcgcatggctggcgtcaggttgggtggtggagatggcaggggacatttcgcatctcgatgcccctgcgcttgacgaactgcagcgttaacgacgtatcggaatcaagaattccatacgcagattgatggggccttcttccggtttggcatcctgcgccgggtagtagcgctcaatgtcctgacctttacggcgattcagattcagcatcggcatgcaggttccgtaaacggtcaggatgaactcctgaacgcccgttcccagcccttcataggcgaacatcacgtattcaccgccttccagcacgacaggttttgaaccctgaatgtagccattggccatctctggcgtcagcgcggtggtgtagaacacctcctgctcgtcgtccttttcctggcttgggtgcgtttcgttgagaccatacagaataggcgggatcgccggtgcgtggctcaggaagtcgcgccagaactggacgcgcatctgatgacggaactcggaaatctgctccagcgaacaggagtagctctgcgtcgtgccgatcagatgggtttccggcagggtaataatttcatacttcggcatcgcgaactcgcccagacgcagcggcggacgcatgccaaacgagctccagtcaggcgagcgacgatacagcgctggcgtcaacgagaactgttttttaaaggcgcgggtgaaggtctgctgcgaatcgaaacgatattgcagggcaatatccagaatcgggcgcgcggtcaggcgcagagccacagcagatttcgataaacgacgtgcgcgaatataggccccgatagcatgaccggtgacatccttgaacatcctttgcagatgccacttggaatagcctgctttagccgccacattatccagtgacaaaggctggtcgagatgaccttccagccaggtgagcaggtcgcgaataattccagcctgatccatatactatcctcatccttaaaacagcaggtgcctgataacaggttagcggataatagcattttttgatgttttagcattcagtgttttttttgcgcattcatgctttttgtagggcattatgggcaaatatattctaatcctgtgatcttgctacatttttgtctaaagtgttgaataatcgctcagtgtaattttaaagaatggtaacaatatgaaatacaagactttgctcttcaccgcgctgatgttgatggccgggcgcgtcgcacatgcggaacagattggttctgtcgacaccgtgttcaaaatgtttggcccggaccacaaaatcgtggtggaggcgtttgacgatccggacgtgaaaaacgtcacctgctatgtcagccgtgcgaaaacgggcggtatcaagggcggtctggggctggcggaagacacctccgatgcggcgatctcctgtcagcaggtgggcccggttgaattgagcgataaaattaaaaacggcaaagcgcagggcgacgtggtattccagaaacgaacctcgctggtgttcaaaaagctgcaggttgtgcgtttctatgatgccaaacgcaatacgctggcttacctggcctattccgataaagtggtagaaggttcaccgaaaaacgcgattagcgcggtgccgattatgccgtggcgggaataaaaaaaacggcgcaaatgcgccgttttttattgcgttaactgcgggattactcctgcaggtcaccgcagaaacggtacccttcgccgtggatcgtggcgatgatttccggcgtatctggcgtagattcgaagtgcttacgaatacgacggatggtgacgtctacggtacggtcgtgcggcttcagctcacggccggtcattttcttcagcagctctgcacgggactggatcttgcccgggttttcgcagaagtgcagcatcgcgcggaattcactgcgcggcagtttatactgctcgccgttcgggctaatcagcgaacggctattgatatcaagttcccagccgttgaatttgtagctatcgacgctacgacgctcttcgctgaccgtgcccaggttcatggtgcgggacagcaggttgcgtgcacgaatggttaactcgcgagggttgaacggcttggtgatgtaatcatccgcaccgatttccaggccaagaattttatcaacttcgttgtcacggcccgtcaggaacattaacgcgacgttcgcctgctcgcgcagttcgcgcgccagaagaagaccgtttttgcccggcaggttaatatccatgatcaccaggttgatatcattttcagaaaggatctgatgcatctctgcgccatcggtcgcttcaaagacatcgtagccttctgcttcgaaaatgctctttaacgtgttgcgtgttaccaactcgtcttcaacgataagaatgtgcggggtctgcatgtttgctacctaaattgccaactaaatcgaaacaggaagtacaaaagtccctgacctgcctgatgcatgtcgcaaattaacatgatcggcttaacgtgactaaagtacgtaattgcgttcttgatgcactttccatcaacgtcaacaacatcattagcttggtcttgggtactttccctttggacccgacagtgtcaaaaacggctgtcatcctaaccattttaacagcaacataacaggctaagtgacaccagacacccaataaaactacgcttcgttgacatatatcaagttcaattgtagcacgttaacagtttgatgaaatcatcgtagccgaatgctagcctttgtcacaatttttcaataaaccaactagttgcggacattgatttataaacgaagcgaatccaatcagaatagagtattcatgttactattatcattataaaacatagggataatagtgttctgttaacattctaactgattgttcagacacagaatagtttagcgttattaatttgttatgaaacgctatttcggtgatttgtgttgcaattttgtaaattcgcgctgcgtaatatgttgaagtgcatcacatttttaccggctaactgattaaaaagagagcataaatgcatctgtcgattgtactggttgcaccagccagagcagaaaatataggcgcagcggcgcgtgcgatgaagaccatgggttttaccgatttacgtattgtggacagcacggcccatctggagccagccgcccggtgggtggcgcatggttcgggagatattctcgataatataaccacttacgctacgcttgccgacgcgctgcatgacatttcgtttaccgttgcaaccaccgcgcgcagccgggcgaagttccactattacgccacgcctgctgaactggtacccatgctcgaagagaaaagccagtggctggagaaagccgcgctggtatttggacgtgaagattccggattaaccaacgaagagctggaattggcggacgttcttaccggtgcgccgatggtggccgattatccttccctgaatttgggccaggcggtcatggtctattgctatcaattagcctccctaatgcaaatccctcaacctcagccagaagcggcaaatgaaaatcagctggccgcgctgcgaactcgcgtgcaggggctgttatcgagccttggcgtcgcggacgatcagaaaatggccgactggctgcagcagcgtcttggtcgtcttgagcaacgggacaccgccatgttgcatcgtttgctgcacgatattgaaaaaaaattggccgagtaaaatactgccataggtttttactatggcgaataagtctgtctgaacgggttgcgtttggggtaatcggatgaaaataaagcggcacgcagcgggacctgagagtctcccaaaatgtgatcaaattaaaaatccattgacttaaggggcccgatcctttaaccctaaaagaatacagcacagacagataataatgacagagtacacaacatccatgaaacgcatcagcatcaccaccattaccacaaccatcatcattaccacaggtaacgatgcgggctgacgcgtacaggaaaaacagaaaaaagcccgcacctgaacagtgcgggcttttttttcggctaaaggaaacgaggtagaaccatgcgagtgttgaagttcggcggtacatcagtggcaaatgcagaacgttttctgcgtgttgccgatatcctggaaagcaacgccaggcaggggcaggttgcgaccgtgctctctgccccggcaaaaatcacgaaccatctggtggcgatgattgaaaaaaccatcggtggtcaggatgcacttccgaacatcagcgacgcagagcgtatcttcgctgacttactgcaaggcctggcagaagcgctgcctggcttcccgcatgcgcaactgaagtcttttgttgaacaagaattcgcgcaaattaaacatgtcctgcacggcatcagccttctcggtcagtgcccggacagcatcaatgcagcgctgatttgtcgcggtgaaaaactctctatcgccatcatggccggcgtgctggaagcgcgcggccatagcgtgaccgtgatcgatcccgttgaaaaactgctggcggtgggccactacctcgaatccaccgttgatattgccgaatcaacccgccgtatcgccgccagcaaaattcccgctgaccacatgatcctgatggcaggcttcaccgctggtaacgagaagggcgagctggtggtgctgggccgtaacggttccgactactccgccgccgtgctggccgcctgtttacgcgcggactgttgtgagatctggactgatgttgacggcgtgtatacctgcgatccgcgccaggtaccggacgccagactgctgaagtcgatgtcgtaccaggaagcgatggagctttcctacttcggcgccaaagtacttcacccgcgtaccatctccccgattgcccagttccaaatcccttgcctgattaaaaacaccggtaacccgcaggcgccgggtacgctgattggcgcgagtaccgatgaggacggactgccggtgaaaggcatctccaacctgaacaacatggcgatgttcagcgtctcgggtccggggatgaaagggatggtcggcatggcggcacgcgtgtttgcggccatgtcccgcaacggtatttcggtggtgctgatcacccagtcatcctccgagtacagcatcagcttttgcgtgccgcaggctgactgccttcgcgcccgccgtgcgctggaggaagagttctatctggagctgaaagaagaattgctggagccgctcgcgattcaggagcgtctggcgatcatctccgtggtgggcgacggtatgcgcaccctgcgcggtatctccgccaaattctttgccgcgctggcgcgcgccaatatcaatatcgtggcgattgcccagggctcgtcagagcgttcaatttctgttgttgtggataacgacgatgccaccaccggcgttcgtgtggttcaccagatgctgttcaacaccgatcaggttatcgagctgttcctgattggcgtgggcggcgtcggcggcgcgctgctggagcaggtgaagcgtcagcaggaatggcttaagaagaaacacatcgatctgcgcgtctgcgggatcgcgaattccagagcgctgctgaccaacgtccacggcctgaacctggaaaactggcaggccgagatgaatgaggcaaaagagccgttcaacctggggcgcctgatccgtctggtaaaagagtatcatctgcttaacccggtcatcgtcgactgtacctcgaaccaggcggtggccgaccagtacgcggactttctgcgcgaaggtttccacgtggtgacgccgaacaaaaaggccaacacctcgtcgatggattactatcaccagctgcgtctggcagcgagcaagtcgcgccgcaagttcctctacgacaccaacgtgggggcaggcctgccggttatcgagaacctgcagaacctgcttaacgcgggcgatgagctgcagcgtttctccggcattctctccggctcgctgtcgtttatcttcggcaagctggatgagggaatgagcctctcggaggccacccgcgccgcgcgcgagctgggctataccgagccggatccgcgtgacgacctttccggtatggacgtggcgcgcaagctgctgatcctcgcgcgcgaaacgggccgtgagcttgagctttccgatatcgtgattgagccggtcctgccggcagaatttgacagcagcggtgacgtcagcgcctttatggccaggctgccgcagcttgacgacgcgtttgccgcccgcgtggcgaaagcccgtgatgaaggtaaggtattgcgctatgttggcaacattgaagaagatggcgtgtgccgggtgaagattgccgaagtggatggcaacgacccgctgtacaaagtcaaaaacggcgaaaacgccctcgcgttttacagccactattatcagccactgccgctggtgcttcgcggctatggcgcagggaacgacgttacggcggcgggtgtctttgccgatctgctgcgtaccctgtcatggaagttaggagtttaacatggtcaaagtttatgccccggcttccagcgcgaatatgagcgtcggatttgacgtgctgggtgcggcggtgacgccggtggacggttcgctgctgggcgatacggtgacggtggaagcggcagacagcttcagcctgaataacgtgggccgcttcgccagcaaactgccgtctgagccacgcgagaatatcgcctatcagtgctgggagcgtttctgtcaggagatcggtaaaaacgtgccggttgccatgacgctggaaaaaagtatgccgattggctccgggctgggttccagcgcctgctcggtggtcgccgcgctggtggcgatgaacgagcactgcggcaagccgctgaacaacaaccgcctgcttgccttaatgggcgagctggaagggcgtatctccggcagcattcattatgacaacgtcgcgccatgcttcctcggcggcatgcagttgatgatcgaagaaaatggcatcatcagccagcaggtgccagggtttgatgagtggctgtgggtgctggcctatccgggtatcaaggtatcaaccgcggaagcgcgtgcgatcctgcccgcgcagtatcgccgtcaggactgtatcgcccacgggcgtcatctggcgggctttatccacgcctgctacacccgtcagccgcagctggcggccaaactgatgaaggacgtcattgccgagccgtaccgcacgaagctgctgcccggctttaacgaggcgcgacaggcgtccatggatatcggcgcgcaggcgtgtggcatctccggctccggcccgacgctgttcgccctgtgcgacaagcctgacactgcgcagcgcgtggcggactggctctctaaacactacctgcaaaatcaggaaggctttgttcatatttgccgtctggacacggctggcgcacgagtattgggataattaatgaaactctacaaccttaaagatcataacgagcaggtcagcttcgcgcaggcggtgactcagggactgggcaaaaatcaggggctgtttttcccgcatgacctgccggaattccagctgaccgagattgatgacctgctgaagcaggattttgtcacccgcagcaccaaaattttgtccgcgtttatcggcgatgaaattccgcaggagctgctggaagagcgcgtacgcgcggcattcgcgttcccggcgccggttcagcaggttgagcctgatgttggctgcctggagctgttccacggtccgacgctggcgttcaaagacttcggcggccgctttatggcgcagatgctgacccacatcagtggcgacaagccggtgaccatcctgaccgcgacctccggggataccggcgcggcggtcgcccacgcgttctacggcctgaaaaacgtccgcgtggtgatcctctatccgaaaggcaaaatcagcccgctgcaggagaaactgttctgcaccctcggcggcaacattgaaaccgtggcaattgacggcgatttcgatgcctgtcaggcgctggtcaagcaggccttcgacgacgaagagctgaaggtggcgctgggtctgaactccgccaactccatcaacatcagccgtctgctggcgcagatctgctactacttcgaagcggtggcgcagctgccgcaggacgcgcgcaaccagctggtgatctccgtgccgagcggtaacttcggcgatctgacggcaggcctgctggcgaaatccctggggctgccggtgaaacgctttatcgccgccaccaacgccaatgacaccgtgccgcgcttcctgaaagacgggaagtgggcgccgaacgccacgcaggcgaccctctccaatgcgatggatgtgtctcagccgaacaactggccgcgcgtggaagagctgttccgccgtaagatctggcgcctgggtgacctgggctatgctgcggtgacggatgagaccaccaaatccaccatgcgcgagctgaaggcggtggggtatacctctgaaccgcacgcggcgattgcctatcgtgcgctgcgcgaccagcttaacccaggtgaatacggcctgttcctggggaccgcacatccggcgaagttcaaagagagcgtggaggcgatcctgggcgaaacgctgccgctgccgaaagaactggccgagcgtgccgacctgccgctgctgtcccatgagctgccggcggactttgcggcgctgcgtaagctgatgatgacccgcgcgtgatttttgtcgggtgcggctacgccttacccgacctacaactgatgatgacgcgtgcgtgattgtgttgcccggtggcggcttcgccttaccgggcctacaaagacgaacaaatcgtaggccgggtaagcgaagcgccacccggctttttttgtgaagaaattaaggagaaaaatagcagggaaaaagcagaaattcccaataaatgcggtcacttagcgtttaggattgcagagaataacatcccccgttcccctcgcgtaatctccttacaacggcccacgttgggcaacgataataaggagtcaccgatgtcaaaactgaaacctgcgctgattgcgctttcactgatgctggtcgctcccatggcggttcaggcatccgaaatcaccctcgtacctgcggtcaaactgcagattggcgaccgggataataacgggcactactgggacggtggccgctggcgcgaccatgactggtggaaggcgcattatgactggcgcgataaccgctggcgtcctcacgatgagcatcgcgagcgtgaccatcatcatgacgatcatcgtccaggtccggactggaaacaccactaatgcaaaaccccgccagccggcggggtttgtttttactgctcgtggcgcttaaacaccagttcgcctttccctgacgacgcctcgtcaaagaaatagccttcgctgttgaaggcggttagctgctccggcttcgtcaggcggttctgaatgatgtagcggctcatcagaccgcgcgctttcttggcgtagaagctgatcactttgaacttgccgtttttctcgtcgaggaataccggcttgatgatgtcggcatccagctttttcggcttcaccgacttgtagtattcatcggacgccaggttaatcaccacgttatcgccctgcgcgcgcagcgccgcattcagcttatcggtaatgatatcgccccagaaatggtacagatctttgcctttggcattctcaagacgaatccccatctccagacgataaggctgcatcagatccagcgggcgcagtacgccgtacaggcccgacagcatgcgcagatgctgctgggcaaaatcaaaatcggcttcgctaaaatcttccgcctgcaggccggtgtacacatcgcctttaaacgccagaatcgcctggcgagcgttagccggggtgaaatccgggtgccactcgtgaaagcgggtcgcgtttaaatcggccagcttgtcgctgatgctcatcagcgaggcgatttgcggtgctgagagcttacgcgcttcgcggatcagctgttgcgagtagtccagcagttcaggctgggtatagcgctcggtggcgagcgggctctggtagtcgagcgtttttgcaggtgaaatcagaatcagcatatccagtccttgcaggaaatttagagcgactttagcaaaaaatcgccctgaattgatcgatagctgttattgccgtggcaaatcatcccacgtgccgggggcaagctgcgccttgatatcgggatagcgggcgggatcaaataccggcggaacgccgagtttgcgctgacgcagatagtctctggcaatcagggtcaccacgggcgagagcagcaggatcgccgtgaggttagtgattgccatcagcgccataatgatatcggccagttgccagaccagcggcatactgagcagggagcctgctaccaccatcaggataacccccagacgcagggttccgatcgcggcgcgggagtcgagtttcaggaaaataaggttattttcggcgtagaggtaattcaccacaatcgagctgaaggcaaacaagatcaggatgagagagacaaatccggctccccagccgccggtcagggtcaccagcgcctgctggagaagctgtatcccgacggttcccgacgcgtggggtacggggcctgccagcagcaaaatcatggcgctggcggaacagataataatggtatcggtaaagacgccaatcatctgcacaataccttgtgcggccgggtgtggcggccaggaagaggcggcggctgccgcattgggggttgaccccataccggcttcattggagaacatgccccgctgaaaacccgccatcagcgcctggctgaaggtgtagcccagcgcgccggatgccacttcgcgccagccaaaggcgcttttgacgatggtggcaagcacgcccggcacctggtcgagatgcagtgcggcgacgaacaggctcgcggcaacccagagcagcgccataatgggcaccagccactgcatcaggcgagcgatacccttgagaccgaatgaaatggtaagcagaacgatcgaagctaaagcgagacccgcgagccactcggggcaggagaaggcatagcgcatggcatgggcgaccgagttcgcctggacggtattaaaaataagaccgtacgcgagcagtaaaaaaagcgagaacaggacgcccatccagcgcatccccaggccacgcgccatgtaccaggctggaccaccgcgaaactggccgcgcttatctttctctttgtagagttgtgcaagcgaactttcggcaaaggaggtggccataccgagaagtgccgtcatccacatccagaagaccgcgcctggcccaccggcgctgatggccagtgctacccccgccagattcccgctgcccaggcgtgccgcaaggctggtacagagcgcctgaaacgacgttaatccgcccggctggggcgtgacgctgtttttcagacttctgccaaacttgcgaatatagcgaaactggataaacccactgcgtagcgtaaaccaaatacctgctcccagaagcaggtaaatcattatcgaaccccagaggacttcgttaataaagaaaaagaaatcaggcattaacgtccctcttgttgatgccaacgtgaatatgtaagcgctaccactgattgggcatgctgttgcttagcagcctgttaatattctgagtttatcatactctgcctaagcgcactgtctgcggttgcgctacccctccgtcgtgttatcatcagggcagaccggttacatccccctaacaagtaaacctgtcatttttccgctgcaggcatgctgtcggtagcgtgaattatccagggcacgttaaaagagaaacactatcatgacggataaattgacctcccttcgtcagttcaccactgtcgtagctgacaccggagatatcgcggcaatgaagctgtaccagccgcaggatgccacaactaacccttctctgatccttaacgccgcacagatccctgagtatcgcaaactgattgacgaggctgtgacctgggcgaaagcgcagagcaacgaccgcgcgcagcaggttgtggacgctactgataaactggccgtgaacatcggtctcgagatcctgaaactggttccgggccgtatctctaccgaagtagacgcacgtctctcctacgacaccgaagcgtctatcgcgaaagcaaaacgtctgatcaaactgtacaacgatgcgggcatcagcaacgatcgtatcctgatcaaactggcttctacctggcagggtatccgcgcggcagagcagctggaaaaagagggtatcaactgtaacctgaccctgctgttctctttcgcgcaggcgcgtgcatgtgcagaagctggcgtatacctgatttctccgttcgtgggccgtattctggactggtacaaagccaacaccgataagaaagagtacgcaccggctgaagatccaggcgtgatttctgtgactgaaatctacgaatactacaaacagcatggctatgagactgtggttatgggcgcaagcttccgtaacgtcggtgaaatcatcgagctggctggctgtgaccgcctgaccatcgcgccagcgctgctgaaagagctggcagaaagcgaaggcaccctggagcgtaaactgtcttacaccggtgaagtgaaagcacgcccagagcgcatcactgaatccgagttcctgtggcagcacaaccaggatccaatggcggtagacaagctggcggacggtatccgtaagtttgctgttgaccaggaaaaactggaaaaaatgatcggcgacctgctgtaatcattccgcgtgaccgggctcccggtcacgcgactgctttcgtaccctgtctgaatttcctctctgcgtgtatcattccctttaatcagtactctttgaatggaatggatatgaataccttacgcatcggcttagtgtcgatttctgaccgcgcctccagcggtgtttaccaggataaaggcatccccgctctggaagtgtggctggccagtgcactgactaccccgtttgagatccagactcgcctgattcccgacgaacagccgattatcgagcagaccctgtgtgagctggtggatgagatgagctgtcacctggtgttaaccaccggcggaaccgggcccgcgcgccgtgatgtgacgccggacgcgacgttggcgattgccgatcgtgaaatgccgggcttcggcgaacagatgcgccagatcagtctacactttgtcccgacggccattctttcccgccaggtaggggtgatccgcaagcaggcgttgattctgaacctcccggggcagcctaagtcgatcaaagagacgctggaagggctaaaagcggaagacggcagcgtcatcgttcacggcatctttgcaagtgtaccgtattgtatacagctgcttgacggcccgtatgtcgaaaccgatgagaaagtggtagcagcttttcgtcctaaaaacgcgcgtcgcgaaacaatctcctgaaattaatcaatatgtgacataagctgaagcggcgatagcgtggtaacggttttacggtatagtaattttttctttacgattgctgtaaaaataaatccacaatacacgcataatggttcgctatgtcacataacacccgacctctgaatcgacaggactacaaaaccctcacgctcgcggccttaggcggtgcgctggagttttacgacttcattatcttcgtcttcttcgctgccgtagtgggggagctcttcttcccggccgatataccggagtggctgcgtcaggtgcaaaccttcggcatttttgctgccgggtatctggcgcgtccgctgggcggcattatcatggcccactttggcgatctggtcgggcgtaaaaagatgtttaccctcagcatcctgctgatggcggtacccacgctggccattggtctgctgcccacctatgcctcgatgggcattctcgcgccgctgctgctgttgctgatgcgcgtgcttcagggcgcggcgattggcggtgaagtgccgggcgcgtgggtgtttgtcgcagagcatgttccggcgcgccgcattggtatcgcctgtggaaccttaaccgcggggctgaccatcgggatcctgctcggctcggtggtcgccaccattgtgaataccagcatgacgcagcaggccgtacacgactggggctggcgtattccgttcctgctgggtggggcgttcggcctggtggcgatgtacctgcgccgctggctgcaggagacaccgattttcctggagatgcagcagcgtaaagcgctggcgcaggagctgccggtgaaggcggttgtggtacgtcataaaaaggcggtggtggtgtcgatgctgctcacctggctactctcggccgggattgtggtggtgatattgatgtctccggtgtggctgcaaaagcagtacggtttcgccccagccgtgacgctacaggcgaacagtatcgcgacaatcatgctctgctttggctgcctggccgccgggctggcggcagatcgtttcggggccagcgttacctttattgtcggcagcctgctactggccgcatcaagctgggcgttttaccatctggcaggcagccatcctgaacagctgttcctgctgtacggcgtggtagggctgtgcgtgggcgtagtcggcgcggtgccgtatgtcatggtgcgcgcgttcccgccggaggttcgcttcaccgggatctcattttcctacaacgtgtcgtatgccattttcggtgggctgacgccgattgcggtgacggtcctgatgggcgtctctcccatggctccggcctggtacgtgctggcgctgtcggtgatggggctggtattgggattttggcttcgtcaggcggggggatgtcgtgcccgcgaggcgggcacgacagagggatcagtgtttttcaccaatcggtagaacggtgcggtcaaactgctcgttcagcacttcacccattgccaggtagatagcgcttgcgccgcaaaccagaccaatccagccggcaacgtgaacgatgccttcgttatccaccaggtgaccgattgccagcagggcaaacagcacggtcaggctcaggaagacgaactgcagcatgcggttgcctttcagggtaccgaagaacatgaacagggtgaagacgccccacaggcccaggtagacgcccaggaagtgggcgtttgccgcgtctgccatgcccattttaggcagcagcagaatggcgaccagggtcagccaaaaagaaccgtaagaggtgaaggcggttaagccgaaggtattgcctttcttatattccagcaggcccgcaaagatttgcgcgataccgccataaaaaatgcccatcgccaggatgatgccatccatcgggaacatcccgatattgtgcaggttcagcagaatagtggtcatgccaaaacccatcaggcccagcggagccggattagccaacttagtgttgcccataagtcctcaaaaaaatcatcattaatatggtgaaatggttaaacccgcgtcagttctccctgacggggcgcggcatcataatgggcgcaatcgatggcgtctatgatctcatcagggtgaaattaaaattttttttatgcttgccccttgatggatgccgtcgcgaccccatcttgtagtcaaccgcagtgtgtggacctgaaaaaaatcaaatctgggcagttgaaaaagcacgttctgcccttattacaggtacacaaccacatgttgactgaatttttagtggagacgtttagatgggtaaaattattggtatcgacctgggtactaccaactcttgtgtagcgattatggatggcactactgcacgcgtgctggagaacgccgagggcgatcgcaccacgccttctatcattgcttatacccaggacggtgaaactctggttggtcagccggctaaacgtcaggcagtgacaaacccgcaaaacactctgtttgcgattaaacgcctgatcggtcgccgcttccaggacgaagaagttcagcgtgacgtttccatcatgccttacaaaatcatcgcggcagataacggcgatgcatggcttgatgtgaaaggcaccaaaacggcaccaccgcagatttctgctgaagtgctgaaaaaaatgaagaaaaccgctgaagattacctgggtgagccggtaactgaagctgttatcaccgttcctgcatacttcaacgatgctcagcgtcaggcaaccaaagatgctggccgtatcgcaggtctggaagtaaaacgtatcatcaacgaaccaaccgcggctgctttggcttacggtctggataaagaagtcggcaaccgtactatcgcggtttacgacctgggtggtggtaccttcgatatctctattatcgaaatcgacgaagttgacggcgaaaaaaccttcgaagttctggcaaccaacggtgatacccacctgggtggtgaagacttcgatacccgtctgatcaactacctcgttgacgagttcaagaaagatcagggcattgacctgcgtaacgacccgctggctatgcagcgcctgaaagaagccgctgagaaagcgaagatcgagctgtcttccgctcagcagaccgacgtgaacctgccgtacatcactgcagacgcgaccggtcctaaacacatgaacatcaaagtgacccgtgcgaaactggaaagcctggtagaagacctggtgaaccgttctatcgagccgctgaaagttgctctgcaggacgctggcctgtccgtgtctgatatcaacgacgttatcctcgttggtggccagacccgtatgccaatggtgcagaagaaagtggctgagttctttggtaaagagccacgtaaagacgttaacccggacgaagcagtggctatcggtgctgcggttcagggtggcgtactgaccggtgaagtgaaagacgtactgctgctggacgttaccccgctgtctctgggtatcgaaaccatgggcggtgtgatgactgcgctcatcaacaaaaacaccaccatcccaaccaagcacagccaggtgttctctaccgctgaagacaaccagtctgcggtaaccatccatgtgctgcagggtgagcgtaagcgtgcggcggataacaaatctctgggtcagttcaacctggacggtattaacccggcaccgcgcggcatgccacagatcgaagtcaccttcgacatcgatgctgacggtatcctgcacgtgtctgcgaaagacaaaaacagcggtaaagagcagaagatcaccatcaaggcatcttctggtctgaacgaagcggaaatcgaaaaaatggttcgcgatgccgaagctaacgcggaatccgaccgtaagttcgaagagctggttcagacccgcaaccagggtgaccatctgctgcacagcacccgtaagcaggttgaagaagcaggcgataaactgccagcggaagacaagactgctatcgaagctgcactgagtgcgctggaatcctcactgaaaggtgaagataaagcggacatcgaagcgaagatgcaggaactggcacaggcttctcagaagctgatggaaatcgctcagcagcagcacgctcaacagcaggcgggcgctgacgcttcggcgaacaatgcgaaagacgacgacgttgtcgacgctgagttcgaagaagttaaagataaaaaataatcgccctgatgcagggtaattaatcggcacgggcgtaggagaactctccacgcccgtgctcgcatgttaaggggcttaaaaaaaccaatggcaaagcaagactattacgagattttaggcgttccgaaaactgcggaagagcgtgaaatcaaaaaggcgtataagcgcctggccatgaaattccacccggaccgtaatcagggtgacaaagaggctgaagccaaatttaaagagatcaaagaagcctacgaagtcctgaccgatgcacaaaaacgtgcggcctatgaccagtacggtcacgcagcctttgaacagggcggcatgggcggcggtggattcggtggcggcggctttggcggcggtgccgacttcagcgatatctttggcgatgtcttcggcgacatcttcggcggtgggcgtggtcgtcagcgcgcggcgcgcggcgcggatctgcgctacaacatggatctgacgctggaagaggccgttcgcggtgttaccaaagagatccgtattccgacgctggaagagtgtgacgtctgccacggcagcggcgcgaaagcgggtacccagcctcagacctgtccaacctgtcacggctccggtcaggtccagatgcgtcagggcttcttcgcggtacagcaggcctgtccgcactgtcacggtcgcggtacgctgattaaagatccgtgcaccaaatgccacggccacggtcgcgttgagaaaaccaagaccctgtccgttaaaatcccggctggcgtggatacgggcgaccgcatccgtctggcgggtgagggtgaagctggcgaacacggcgcaccggcaggcgatctgtacgttcaggtgcaggtgaaacagcacgctatcttcgagcgcgaagggaacaacctgtactgtgaagtgccgatcaacttcgcgatggcggctctcggcggcgaaatcgaagtgcctacgctggatggtcgcgtcaatctgaagatcccgggcgagacccagaccggtaagctgttccgcatgcgcgggaaaggcgttaaatccgttcgcggtggtgcgcagggcgacctgctgtgccgtgtcgtcgtggaaacgccggttggcctgaacgataagcagaaacagctgctgaaagagttgcaggagagctttggtggtccgacgggtgagaaaaacagcccgcgttccaaaagcttcttcgatggcgtcaaaaaattcttcgatgatttgacccgctaatccgttagctggttttcatcttcaaaaagcccggaagcgattccgggctttttttatttacggttattgctcggtaaaagtgaatctatactcaatattaatctgtttttgccgagctatttggcttggtattatggttttatcgaggtattgttgtaaaagagagaacttaaatgaaattactacaccgtttctttagcagtgaggcgtccggtggcgtgctcctgattattgccgcagcggccgcgatggtgctggctaatcttggcatcacgcgggatctctatcatgcatttctggaaacgcccgttgagctgaaggtcggggcgctggaaattaacaagaacatgctgctgtggatcaacgatgcgctgatggcggtgttcttcctgctggtggggcttgaagttaagcgcgagctggtgctgggctcgcttgccagccgccagcgcgcggcgttcccggtcattgccgcgctcggtgggatggtggtgccggcgctgctcttcctggcgttcacctggcaggatccggttgcacgtcacggctgggcgatcccggccgcgacggatattgcctttgcgctcggggtgctggccttgctgggaagccgcgtgccggttgcgctgaaaatcttcctgatggcgctggcgatcatcgatgatcttggcgccattgtgattatcgcgctgttctacaccagcgatctgtcgatcctgtctctgagcgtggctgccggagcgattgcggtgctggcgctgctgaacatctttaatgtgcgccgcatcggtatctacatcctcgtggggatggtgctgtggacggcggtgctgaaatccggcgtgcacgccacgctggctggggtgatcgtcggcttcttcgtaccgcttaagccgcaggacggcaagtcgccggccaaacagctggagcatgtgctgcacccgtgggtcgcctttatgatcctgcccctgtttgcgtttgctaacgccggggtttcgctgggcggcgtgacgctggacgggctgacgtccgtgctgccgctgggcattattgccggtctgtttatcggtaagccgctgggtattagcctcttttgctggctggcgacgaaactgaagctggcgtcattgccgcacggcaccacgtttaagcagattatggccgtcggcgtgctgtgtggaatagggtttacgatgtcgatctttatctcgacgctggcgtttggcgcgcatgcgcctgagctgatcgtctgggcgaaactcggcattctcatcgggtcattactggccgccgtaattggttataccttgttgaaggtgaaattgtccggacaggccgtccaggcataacggaacaccgggaggaggcgatccttctcccgaaacacgctcaaggagcgaagacgcgatgtctcatttgaattacaaccatctttactacttctggcacgtctatagacagggctcggtggtcggggctgcagaggcgctctacctgacgccgcaaaccatcaccgggcaaatcaaggcgctggaagaacgtttgcagggcaagctgttcaagcgtaaggggcgcgggattgaacccagcgagctgggtgagttggttttccgctacgcggacaaaatgtttacccttagccaggagatgctggatatcgtcaactaccgcaaagagtcgaacctgctctttgatgttggcgtggcggatgcgctgtccaaacggctggtgagcggcgtgctggatgcggcggtggttgaagatgaacaaattcatcttcgctgctttgaatccacccacgagatgctgctggaacagctgagccagcacaagctggatatgattatctcggattgtccgatcgactcgacgcagcaggaagggctgttctcggtgaaaattggggaatgcggcgtgagcttctggtgcattaatccgccgccggagaaacccttcccggcctgcctggaagagcgtcgactgctggtgccgggaagacgttccatgctggggcgcaagctcctgaactggtttaactcgcaggggttaaacgtggaaatcctcggcgaatttgacgatgcggcgctgatgaaagcctttggtgaagcgcacaacgccatcttcgttgcgccaacgctctacgcgcacgatctctattcggacgacaagattacggagataggcagagtggataacgtgatggaggagtatcacgccatctttgctgaaaggatgattcagcatccggcggtacagcgaatctgtaaccgtgactactcggcgctgtttacgccaccggcaatctgaagatataaaaaaacccgcgttaagcgggttcttttaaaacaagcaacaacaagcggcgattaagccagtttgttgatctgcgcggtcaggtttgctttatgacgcgctgctttgtttttgtggatcagacctttagcagcctgacgatccacgattggttgcatttcgttaaatgcgttctgcgcagcagctttgtcgccagcttcgatagctgcgtatactttcttgatgaaagtacgcatcatagagcgacggcttgcattgtgcttacgagccttttcagactgaatagcacgtttcttagctgatttgatattagccaaggtccaactcccaaatatgatctatgtggacaattcaaaggccgaggaatatgccctctataccttcttttgtcaatggatttgtgcaaataagcgccgttaatgtggcgacgctacgttacgtagtgatggcgcaggattctaccagcttgttgtccgtgaatacagcttttcggcataaaaatcgcagttcgcgagcagattttttcgctgcgaaaggtcagcctgatgaaatcattacggctttctgttttgcacgaacaatcgccggttaaccttaaccgctgtacaaggtatactttggcgattttcactgttttgagccagacatgaagctgatacgcggcatacataatctcagcagagccccgcacgggtgcgtgctgaccattggtaatttcgacggcgtgcatcgtggtcatcaggcgctgttgcagggattgcgtaaagaaggggaggcccgtggcctgcccgttgtagtgatgattttcgaaccgcagccgctggagctgttcgcgggcgacaaatctcccgcccgtcttacacgcctgcgcgagaagttgcgctatctgactgagtccggcgtggactatgtattgtgcgtacgtttcgatcgccgctttgccgcgctgacagcacaaaatttcgtcagcgacctgctggtgaagcgtcttggcgtgcagtttcttgccgtgggcgatgatttccgctttggcgctggtcgtcagggtgatttcttgctattacagaaggctggtctggagtacggttttgacgtcaccagcgcgatgaccttctgtgaaggcggcgtgcgcgtcagcagcacggcagtgcggcaggcgctggccaacgatgaactggatacggcagaaaacctgctgggacatccgttcaccatctctggtcgcgtggtccatggcgatgcgctgggccgcacgataggtttcccgacggcgaatataccgctgcgtcgtcaggtttccccggttaaaggggtctatgcggtggaagtggcaggactgggcgaaaagccgttttacggcgtcgccaatattggcacgcgtccgaccgtcgccggtgtgcgtcaacagctagaagtgcacctgctggacgttgtaatggacctgtatggtcgccatatagatgtgatactgcgtaaaaaaatacgcaacgagcagcgatttggttcgctggatgaactcaaagcgcaaattgcgcgagatgaattaacagcccgcgagttttttgggctttgaacccggcttaactgcctacgtgataaatacggaaccgagaatctgatgagtgactataaatcaaccctgaatttgccggaaacagggttcccgatgcgcggcgatctcgccaagcgtgaaccgggaatgctggcgcgttggaccgatgatgacctgtacggcatcattcgtgcagccaaaaaaggcaaaaaaaccttcattctgcatgatggccctccctatgcgaatggcagcattcatattggtcactctgtaaacaagattctgaaagacattatcgtgaagtccaaaggactggcgggatatgactcgccttacgttccgggctgggactgccacggcctgccaatcgagctgaaagttgagcaggaatttggcaagcctggtgagaaattcaccgccgctgagttccgtgcgaagtgccgcgaatacgcagccacccaggttgacggtcagcgcgctgacttcatccgtctgggcgtactgggcgactggtcgcatccgtacctgaccatggacttcaaaaccgaagccaacatcatccgtgcgctgggcaaaatcatcggtaacggccaccttcacaaaggcgcgaagccggtgcactggtgcgtggactgccgttctgcgctggcagaagcggaagtggagtattacgacaaaacctctccgtctatcgacgtagccttccatgccgtcgatcaggatgcggtgaaagccaaatttggcgtgtcgtccgttaacggcccgatctcgctggtgatctggaccaccaccccgtggaccctgccagccaaccgcgcgatctccctgtccggtgaattcgaatacgcgctggtgcagattgacggccaggcggttatcctggcgaaagatctggttgaaagcgtgctgaagcgcgcgaacatcgccgattacaccgtgctgggcacagtaaaaggcgacgcgctggagctgatgcgcttcaaacacccgttcctggacttcgacgttccggcgatcctgggcgaccacgtaacgctggacgcgggtaccggtgcggtacataccgccggtggccacggtcctgacgactacaacatcagcctgaagtacggtctggaaatcgctaacccggtggggccggacggttcctacctgcctggcacctacccagcgctggacggtatcaacgtcttcaaagcgaacgacattattgtcgacatgctgcgcaccagcggcgcgctgctgcacgttgaaaaaatgcagcacagctatccgtgctgctggcgtcacaagacgccaatcatcttccgtgcgaccccgcagtggttcgtcagcatggatcagaagggcctgcgcgagcagtctctgaaagagatcaaaggcgtgcagtggatcccggactggggccaggcgcgtatcgaatccatggtggctaaccgtcctgactggtgtatctcccgtcagcgtacctggggcgtgccgatgtcgctgttcgtgcataaagagacgcaggagctgcacccgaacaccctcgaactgatggaagaagtggcgaagcgcgtcgaagttgacggcattcaggcgtggtgggatctcgacgcccgtgacatcctgggcgctgatgcggacagctacgagaaagtgccggataccctggacgtatggttcgattccgggtctacccactcctccgtggttgacgtgcgtccggaatttgccggtcacgctgccgatatgtatctggaagggtctgaccaacaccgcggctggttcatgtcatctctgatgatctccaccgccatgaagggtaaagcgccttaccgtcaggtactgactcacggtttcaccgtggatggtcagggccgtaagatgtctaaatctatcggtaataccgtttctccgcaggatgtgatgaacaagctgggcgcagacattctgcgtctgtgggtggcgtcgaccgactacaccggcgaaatggcggtgtctgacgagatcctgaaacgcgctgccgacagctatcgtcgtatccgtaacaccgcgcgcttcctgctggcgaacctgaacgggtttgatccggcaaaagacatggtgaaaccggaagagatggtggtgctggaccgctgggcggtaggctgcgcgaaagcggcgcaggaagatatcctgaaggcctatgagtcttatgacttccacgaagtggtgcagcgcctgatgcgcttctgctccatcgagatgggctcgttctatctcgacatcatcaaagaccgccagtacaccgcgaaagcggacagcgtggcgcgtcgtagctgccagaccgcgctgttccatatcgcagaagcgctggtacgctggatggcgccgatcatgtccttcaccgcggatgaaatctggggttacctgccgggcgatcgtgagaagtatgtcttcacgggcgagtggtacgaaggtctgttcgatctctccagcaccgaagcgatgaacgatgccttctgggacgagctgctgaaagtgcgtggcgaagtgaacaaggttatcgagcaggcgcgtgctgataagaaagtcggcggctctctggaagcggcagtgaccctgtacgcggagccagagctggcggcgaagctgacggcgctgggcgatgaattacgatttgtcctgttgacctccggtgcgaaagttgcggattatgctgacgcgtctgctgatgctcagcagagcgaactgctcaaaggactgaaagtcgcgctgagcaaagccgacggtgagaaatgcccgcgttgctggcattacaccaccgatgtcggtcaggtggcggaacacgcagacatctgcggacgctgtgtaagcaacgtcgccggtgacggcgaaaaacgtaagtttgcctgatgagtaaaactctctgttcaacaggactgcgctggctatggctggttgtggtggtgctgattatcgatctgggcagcaagttcctgatcctccagaactttgctctgggggagacggtgcctttgttcccgtcgcttaacctgcactacgcgcgcaactacggtgcggcgttcagtttccttgccgacagcggtggctggcagcgctggttctttgcgggtatcgctctcggtatctgcgtgatcctggcggtgctgatgtaccgctcgaaggcaacgcaaaagctgaataacatcgcctacgcgctgatcattggcggcgcgctgggcaacctgtttgatcgcctgtggcacggctttgtggtcgatatgatcgacttctacgtcggcgactggcacttcgcgacctttaacctcgctgatagcgccatttgcatcggtgcggcgttaatcgtgctggaaggcttcctgcctaaaccggccgcgaaagagcaggcgtaacaaaaccagccgggtgacgcgtagcgatcccggcctaaagaatttgtggcccccgtaggcccggtaagcgtagcgccaccgggcaacaggtgacccaaaacaagcgagcaatttgcatgtctaaatccgtacagagcaacagcgcggttctcgttcactttacgctgaagctggatgacggctctacggccgaatccacccgcaacaacggcaaaccagccctgtttcgtcttggcgatacctccctgtctgaaggtcttgagcagcagcttctcggtctgaaagagggtgagaaaaaagccttttcgctggagccggatgccgcgtttggcgtgccaagcccggatctgatccagtacttctcccgtcgtgagtttatggacgcgggtgaaccggagatcggggcaattatgctctttaccgctatggacggcagcgaaatgcctggcgtgatccgcgaaatcaacggtgactcgattaccgttgacttcaaccatccgcttgccgggcgtaccgttcattttgatgttgaagtgctggaaatcgatccggcactggaggcttgaaatgcagatcctgttggctaacccgcgcggcttctgcgccggtgtagaccgcgctatcagcattgttgaaaacgcgctggagatttacggcgcgccgatttatgtgcgtcacgaagtggtgcataaccgctacgtggtcgacagcctgcgcgaacgcggtgccatctttatcgagcagatcagcgaagtgcctgacggtgcgatcctgatcttctccgcgcacggcgtctctcaggcggtacggaacgaagcgaaaagccgcgatttgaccgtgttcgatgccacctgcccattagtcacgaaagtgcatatggaagtggcgcgcgccagccgccgtggtgaagagtcgatcctgattggccatgctggccacccggaagtcgagggcaccatgggccagtacagcaaccctgaagggggaatgtatctggtggagtcgcctgaagatgtcctgacgctgaacgtgaagaacgaatcccgtctgtcgtttatgacccagacgacgctctccgtcgacgatacctcagacgtgattgacgccctgcgtcagcgcttcccgaaaatcgtcgggccgcgcaaggatgacatctgctacgccaccaccaatcgtcaggaagcggtgcgcgcactggctgaacaggcggacgtggtgctggtggtcggctctaagaactcctccaactccaaccgtctggctgaactggcacagcgaatgggcaaagcggcgtttctgatcgacgatgccacggatattcaggaagcgtgggttaaagacgcggcctgcgttggcgtgacggccggggcgtccgcgccggatattctggtacaaaacgtcatttcccgtctgcaggagctgggcggcggcgaagcggtgccgctggaaggacgtgaagagaacattgttttcgaagtgccgaaagaactgagaatcgacgcccgcgaagtcgaatagtcccttttctgatgaaaggccagcacctcctgtgctggccttttttttatccgttactttatcgtgacgacaaaatcatgtcttttactgatatttaagtcggtttcacgttaaattctaattattggtgttttcagttggcagtgctcagaaaggctggttaatctgaaaacggtttacatcattttaacgtaagagaataactatgcatgatgcacagatccgtgtcgccattgcgggcgcgggtggacgtatgggccgtcagctgattcaggcggcacttcagatggatggcgtagcacttggcgcggcgctggagcgtgacggttcatcgcttctggggaccgatgctggcgagctggcgggcgcgggaaagaccggcgtcaccgtacaaagcagcctggatgcggttaaagaggacttcgatgtcttcatcgattttacccgcccggaagggacgctcgcgcatctggcattttgccgccagcacggcaaggggatggtgatcggcaccaccggttttgacgatgcgggcaagcaggctatccaggatgcatccaaagagattgcgattgtcttcgccgcaaactttagcgtgggggttaacgtcatgctgaagctgctggagaaggccgcgaaggtgatgggcaactacaccgatattgagattgttgaagctcaccaccgctataaggttgatgcgccatccggcacggcgctggcgatgggcgaagcgattgctcatgcacttgataaagatttaaaagactgtgcggtctatgcccgcgaaggccacaccggggagcgcgtgccaggcaccattggtttcgcaaccgtccgggcgggtgacatcgtcggcgaacataccgcgatgttcgccgatattggcgagcgcgtcgaaattacgcataaagcgtccagccgaatgacgtttgccaatggtgccgttcgatccgctttgtggttgaaagagaagaaaaatggtctttttgatatgagagatgtgctggatctcaacaatttgtaagtattattacccatcgtgatgtggttattgcagtcgtaattacttgattgcatagggcaataatttattgcccttttattttatctgtttcgtgattattttgttcatttagccttgaaagtatagctgttcctcttgattctcgttactgaaatgtaaattttgaccatttggtccactttttgatgctgcgtcgactcatttttcattaaacccggcgcgcaagcgttttccgcagtgatttacctgatctttttgtcgcttaagcttcactcgcctcgccagatacgcaaaagactaaacaaaatatcggttttaagttgacttttacccaccaaatctccagaatgccgccgtttgccaaaaatccgctggcaacacatttgcattgatccatgacatggttatgaattaatatgcaaataaagtgagtgaatattctctggagggtgttttgattaagtcagcgctattggttctggaagacggaacccagtttatcggtcgggccataggggcaacgggttcggcagttggggaagtcgttttcaatacttcaatgaccggttatcaagaaatcctcactgatccttcctattctcgccaaatcgttactcttacttatcctcatatcggcaatgttggcaccaatgcggctgacgaagaatcctctcaggtacatgcgcaaggccttgtcattcgtgacctgccgctgattgccagcaacttccgcaacactgaagatctctcttcttacctgaagcgccataacatcgtggcgattgccgatatcgatacccgtaagttaacgcgtctgctgcgcgagaagggtgcacagaacggctgcatcatcgcaggtgataacctcgatgcgacgctggcgctggaaaaagcgaaagctttcccgggcctgaacggcatggacctggcgaaagaagtgactaccgctgaagcctacagctggactcagggtagctggacgctggaaggcgacctgccggaagcgaaaaaagagagcgagctgccgttccacgtggtggcctacgattttggcgccaagcgcaacatcctgcgcatgctggttgaccgcggctgccgcctgacggtagtgcctgcacaaacgtctgccgaagacgtattgaagatgaatccggacggtattttcctgtccaacggtcctggtgacccggcgccgtgcgattacgccatcgccgccatcaagtccttcctggaaaccgatatcccggtattcggcatctgcctcggccatcagctgctggcgctggcgagcggtgcgaacaccgtcaagatgaagttcggccaccacggtggtaaccacccggtgaaagacatcgataacaacacggtgatgatcaccgcgcagaaccacggctttgccgtcgatgaagcctcaatgccggctaacctgcgcgtgacccataagtcgctgttcgatggcaccctgcaggggattcatcgcaccgataagccagcgttcagcttccagggccacccggaagcgagcccgggcccacacgacgccgcgccgctgttcgatcacttcatcgaacttatcgagcaataccgtaagaccgctaaataatcaggagccgagaagacaatgccaaaacgtacagacataaaaagcatcctgatccttggcgctggcccgatcgtcatcggccaggcctgcgaattcgactactccggcgcgcaggcgtgtaaagccctgcgtgaagagggctaccgcgtcatcctggtgaactctaacccggcgaccatcatgaccgacccggaaatggctgatgcaacctacatcgagccgattcactgggaagtggtgcgtaaaatcatcgaaaaagagcgcccggacgcggtgctgccaaccatgggcggccagacggcgctgaactgcgcgctggagctggagcgtcagggcgtgctggccgagttcggcgtgaccatgattggcgcgaccgccgacgcgattgataaagccgaagaccgtcgccgcttcgacgtggcgatgaagaaaatcggcctcgacaccgcgcgctccggtatcgcacacaacatggaagaagcgctggccgttgcggctgacgtgggctatccgtgcatcatccgtccatcgttcaccatgggcggcaccggcggcggtattgcctacaaccgcgaagagttcgaagaaatttgcgaacgcggtctggatctttccccaaccaaagagctgctgattgatgaatcgctgattggctggaaagagtacgagatggaagtggtgcgtgataaaaacgacaactgcatcatcgtctgctccatcgaaaacttcgatgcgatgggtatccacaccggcgattccatcaccgttgcgccagcccagacgctgaccgacaaagagtaccaaatcatgcgtaacgcctcgatggcggtactgcgtgaaatcggcgtggaaaccggcggttctaacgtgcagttctccgtgaatccgaaaaccggccgtctgattgttatcgaaatgaacccgcgcgtgtcccgttcctccgcgctggcctctaaagcgaccggcttcccgattgcgaaagtggcggcgaaactggcggtgggttataccctcgacgagctgatgaacgacatcaccggtggccgcacccctgcgtccttcgagccgtccatcgactacgttgtgaccaaaattccacgctttaactttgagaaattcgctggcgcgaacgaccgtctgaccacccagatgaaatccgtcggtgaagtgatggcgattggccgcacgcagcaggaatccctgcagaaagcgctgcgcggcctcgaagtgggcgcgaccggctttgacccgaaagtgagcctggacgacccggaagcgctgacaaaaatccgccgcgagctgaaagacgcgggtgcggagcgcatctggtacatcgccgatgccttccgcgcgggcctgtccgtcgacggcgtgttcaacctgaccaacatcgaccgctggttcctggtacagattgaagagctggtgcgtctggaagagaaagtggctgagctgggcatcaacggcctggacgcagacttcctgcgcatgctgaagcgtaaaggcttcgccgacgcgcgtctggctaagctggcgggcgtgcgcgaagcggagatccgcaagctgcgcgaccagtatgacctgcacccggtttacaagcgcgtcgacacctgtgcggcagagttttctactgacaccgcgtacatgtactccacctatgaagacgagtgcgaagcgaatccgtcagttggccgcgacaagattatggtgctgggcggcggtccaaaccgtatcggccagggcatcgagttcgactactgctgcgtacacgcctcgctggcgctgcgtgaagacggttacgagaccatcatggtcaactgtaacccggaaaccgtctccaccgactacgacacctctgaccgcctctacttcgagccggtgacgctggaagacgtgctggaaatcgtgcgcatcgagaagccaaaaggcgttatcgtgcagtacggtggccagacgccgctgaagctggcgcgcgcgctggaagcggcaggcgtaccggttatcgggaccagcccggatgcgattgaccgcgcggaagaccgcgagcgtttccagcaggcggttgaccgtctgaagctgaaacagccggcgaacgccacggtgacggccatcgaacaggccgtagagaaggcgaaagagattggctacccgctggtggtgcgtccttcttatgtgctgggcggccgcgcgatggaaatcgtctacgacgaagccgacctgcgtcgctacttccagacggcggtgagcgtctccaacgatgcgccagtactgcttgaccgcttcctcgacgatgcggtagaagtggacgttgacgccatctgcgacggcgaaatggtgctgattggcggcatcatggaacatattgagcaggcgggcgtacactccggcgactccgcctgttctctgccagcgtacaccctgagccaggagattcaggacgtgatgcgccagcaggtacagaagctggccttcgagctgcaggttcgcggcctgatgaacgtccagtttgcggtgaaagataacgaagtctacctgattgaagtcaacccgcgtgcggcacgtaccgtaccgttcgtctctaaagccaccggtattccgctggcgaaagtggcggcgcgcgtgatggcaggccagacgctggcacagcagggcgtgaccaaagagatcattcctccgtactactcggtgaaagaagtggtgctgccgttcaacaaattcccgggcgttgacccgctgttagggccagaaatgcgctcaaccggggaagtgatgggcgtgggtcgcaccttcgcagaagcgtttgccaaggcgcagctgggcagcagctctaccatgagaaaatcgggccgtgcgctgctctccgttcgcgaaggcgataaagagcgcgtggttgacctggcagccaagctgctgaagcagggctttgagctggacgcgacccacggtacggcaattgtgctgggcgaagcgggtatcaacccgcgtctggtgaacaaggtgcatgaaggtcgtccgcacattcaggatcgtatcaagaatggcgaatacacctacatcatcaacaccaccgcaggccgccaggcgattgaagactccaagctgattcgccgcagcgcactgcagtacaaagtgcactacgacaccaccctgaacggcggtttcgcaacggccatggcgctgaatgcggatgctaccgagaaggtgatttcggttcaggaaatgcacgcgcagattagcaagtaagtaaaaatgcccggtgccgttcgggtgccgggcattcaccccatcttcagaaccttctggtttttcatcctctttcagtcagttagcctaaaattgttaggtcgataacgaaattcaactgagagcaggggaaaacaccatgcaaaataaattactgatcgccacccttcttgccgctactgcaacgtttaccgtcgcgggctgttcctctaaccaggcagtgaaaaccaccgatggcaaaaccattgtcaccgacggaaaaccacaggtcgatgacgataccggtctggtgtcgtataaaaatgcggaaacgggtcagaccgagcagatcaaccgcgatcaggtgaaatcaatgggcgagctggataactaataaaaaaagccgtggcgtttgccacggcttttagtctttcaggaacgattaccagcggtggttcagcaggatatgaccgccataagcagcatagctgttctcaccccactcgccgctggcgcgcagggagagcgtcgtggtttcgttcaggttgccggtgacgcccagctctaactgaccacgatcttccggcgtatcgttgctgacggcctcgccgttaaacgccagatcgttctgacctgcgcctttcagccagttcacggcaacgtacggctgccaggctttcacgtctttctgttcgaagtagcttgatttgacgcccagacgaccaaacagaccgtcgttgtccagcgtggtaatccgcacgccgtctcgatcggtatggttttcctgatccagatagctgtagataacctgcgcctgaggttcgattttccaggtgcgctcattttctgaatcaatcacccatgcatggcccacttcgacggatgccgcgaagccttcactgtcgtaatcttcatcattacggttgctggtcactttattgttgtaccagctataggcggcccaggtatcaacgtagctgcccagacgcagcttctgatcttcctgccaggttgcatacaggccgacgttaaagccatccactttgccctgcgcatcacgtacgttgtgttttgcatcagagtgggtcttcgcctggcctgccccgaacatgccacccgcacgcaggatgccgttgtccattggcttactcatgaagtcgctgcctacctgaaggacagtggtggtggtgtcatagctgactttgtcaccgcccgcattgttttcatggtagcggcctttgacgtacatccaggtgttgagatcttcctcgttacggaaggtgatctgatcgcgatcgtcacgcttgtgcaggaacatgctctgcgcggcaaggtagttacctaagtaagcgccgacctcaggagccatgacttcgggaccgctattgctgccgttgtcggtgttaccaccgttgtcagtgttactgccgttgtcggtgttaccgccattgtcggtgttactgccgttgtcggtattaccaccgttgtcggtatcggtatcgtctgccggaatgtctgatggcgttgccttcgattccagataccagtttccgtcgccgtgctgataaagattatactcatacgcactcgcaacaaccggttttgccagggtgagctgagcttctgaactgccgccaactctgacaatttccatcccgtttacggtttgcgcgcccagcccccccatgttgctgacgctgaccccggattggccaaagctgctcccggtgatggtgagatggtcggttggtgcattatcctcaccgagcgtactgtttaacacgatctggctgcccgcggagccggtatagtcgccgttaatggtgaaattgttgccaacgctgttattggcggcgctgagcaacagtttgccgccattagccacgttgccgttgatagtatcaacggcggcagcgctgagcgtggcgttaccctggactgcattccatgccgccagcgtaccgcccgccagaacatgaatgttattgttcacttcacccgcagtagcaaacgtagcgccattttcaaaggtgacggtggcgttactgttctttacgccgagcgtagcaccattagcgaccagggtggtgccgccgtgcagaacagtatcgcccgtgtagctgttcttgccggtgagggtcagggtgtgtgaatctactttctcaaccttgccgctaccggtcatatcggtggcgaaagtggaattgttgccctgattaaatattaccgtaccgttgtttttcagaccgccactgagcgaagctgttttttggccattgcctaattgtagagaggcatctttagtaaccagcgtattgccgctattagagacggttcccgccagcgttaaatcaccgctgttaacctgaagggaatcgccagaaccgatcacgtcgagatcacccgtcagcgtccagctttcaccctccattttgacagaggcaaaaccgtctcccttattcaggccaacaaaattgctgtcttctattccggcaccaaccagcgtgaggctatttcccgttgagccggtagagatcacatcaccgttgagcgaggagccggtattgagtaccagcgtattatttttattactggcaaaggagattgccgtattgccgccaccgattgaaccactgtttatgatgtcgactttagcggtattcgttatgttgattccgtgctgaaggccctctacggtacccgtgttcgtgagcttaatattgccatcgctcagggtaataccgtcaacttctgtacccttgatggtgccaacgaaccggtacgctgcatgttctcaaacttaaggaatatttcgcccttacaccgttcgctgagataattcgagcgcggcataccggttttatatatcttgcctgccagtcgttttctggcgtcctgaatatcttcaatggttaccgggagatcgtaggtaatatgcataatatcctcgttataataattcattcttttcaggcaaagtcagggtatcagagcgttaatacgttaagctctgggtatttttaaaataaaaacttattattcatcgtcgtctttcgatattcatcgacgaatattgtttagccagctcaactaatactgacgccgattttttaatcctgtaatttttagaccacacggcggcataacgcgccacgggtaattcgtcttccacgggcagcgcaataaattgatccgaaccgaatggggcaatcatgtcgcggggaatcactgtcagataatcggcattcaggacaaggttataaatggtgacgacggaatcggtctggacgatgttttcgatgctgatgtggttgtcttgcagagtggtcagaagttctttgtagtagcccatatcggtttgcggcatcacccactgctcgtgcgtaagcgatgccagtgtcgtcgggccggtgcacgttcgcgttttgctcgcgaccagcacaaactcagactcaaacagcggttcgacgtgcagatcctgcagcagcatttcatcgctcagcgtgcctatagcgaaatccagacgaccatcgcgaatggccggaaggaaagaggagagctgagcttcatacattgagacgcgcgctttcgggaacacttccttgaattttttgatcatctcagacaggaaggtaaaaccaatcagcgacggatagccaaaggagacatccataacggtgctaaaactgagactgttgatttcgctcaccatgtttttcatttcacgggtgatcgactcggagtacgagagcagaacctggcctgcagccgtcagttttacgcccgtatttttacgtaccatcacttccacaccgaagtaagattcgatatcgctgatgattttgctgacggcgggttgcgtcaggcccagttgtcttgcagcagaacctatggagccacttttaatgacttcctgaaataccacgaggtgctgtgttttcggtagaataatagtgttcataatattctgcgcttatttccctatgacggggtgaattctactcaataatgtttcagggggtatgtgctgttactcacaatttgctttgagcaacccttagctcacgcttcaaaaacccaataaaacccttgtaaatcaatgaattgaaggcaattaaatacgctacaacgctgatattgatcaacaaaaatagcgctaataaatttattttatggcgataacccggatttatttcaccgttcttaaaaaatcaataaagacgatatttcaggcaattaaaggctaataaataaccgtcatttgtttgaaacatactttcatttaagccattttttacgacgtaaattttcaaatttcaggaaaagagtggaatacgtcacatattcacggaggaaatgtatttgatttcaataagcgcacatcaaacgagaaaagatttacgaacattaagccaacaatcataacaaattatcaatactacagatcgccggttttttagatttaaattttgtgatggcgatcgtctgcagatgccgaggtggaaccggcgagtgaaaaacagtgaaatgtgcttaatgtcgcaaatatgagaattgatgtcgtttgtgtggtgccggatggcgctgcgcttacccgttcgtcgtggttgtccgccggggtaattcccggcgacttatccagcccctcgtcacaatgattgccgtattaacctactatttccagacaccacaacgactcttgtcgtttgtaggcatcagaactttttggtccggaagcgggtatacatcatcagatagcgtttcagattgcgtagcgtcatcagtttcatcagggtttgagggcgcatctttttgttgcgaatgtagtacagagtgaagagctgatattttttactcgatacgtctaatttggctttgtgtttccggtaaaaacgtagataacctgaaaactttcgtcctgagcaggtaatgcgggcttcgccgtgattgacataaagcacctgtgtgatgtcatccagtttgaaaggttcaccaaaagtttctgcaagccgataaaaagcatcataatcctgagcagccggcaaggcgtcgtcgaacaggatctgctgcattctactggttaaggtcagcatttggttgcctataatattccgtttatcaaacaggctttttttataagccggtttcggatacacctgtaattcatcaggatgatgatatccggtaccgtcacagagataatcatttgcgtacaaaaaactgtgcaactgaagtttatgttgccaggtaagaaaagaagacaggcgtgtcggcagccattcatcatcatcatccagacccgtaataaggtcaccacgggccattcttatagcctgatttcggactgcacaagcgccagagttaaattcattgcgaatataggtaatgcgtgggtcattcagctcggagatatacgtcaagagttggtctcatgacgatgagaaatcgtcaatgataatgagttcccagttcacatagtcttgattcagtaccgattgtatggctctgatcgtcaatgcctggcggttccaggttggcatatagatggagatgagtggtcgggatagtggcgtgtcactttcattttgttcatattccgtcaataacctgacatcatggatatcacttccagtaaaatccacgcaagtacaattagcgtgactaaaaattgtaccttccgttttacagtagctaagattagcgcctgcaaggttggcacaggagaaatcggctcctcgaagatcacaaaacgaaatatcgcatcccgataaattaatattgcgtagatagagccccctgagatccataaacctcagatctgcacctgctaaaccaggctgatatcggtgatttttaagtatatttttatgatattggattagtttttttagtttgttttttctgtccatgctcaaccgaataccgatgagaaaattaggcattgagttaagcgttcttatcattctatagcaatagccccccttcattttcagaaattaattagggacaaactgtatttattaacgttttatttatttttctcatacattgtagtgagccaggggggcctgtagagccaatattgtcagtaaataaatatgaatcgcaatccagagacatacatataaactgaagggagacggaaatgaaggccgttgcagttgccctatttcaggatagtcgggatggaacagccgttggtgtgcctcgtttgtatcacagtctgtgtcacagctttgccttagaaagcctgagacacaccaacgtattgttttagaagaagttgaagctgaccgataagccgggttctgtcgtggacagtcattcatctaggccagcaatcgctcactggctcaagcagcctacccgggttcagtacgggccgtaccatgtgaacccctatttggccttgctccgggtggagtttaccgtgccacggactgttaccagccgcgcggtgcgctcttaccgcaccctttcacccttacctgatcccgcttgcgcgggccatcggcggtttgctctctgttgcactggtcgtgggtttcccccccaggcgttacctggcaccctgccctatggagcccggactttcctcccctccgcccgtctcccccgaaagggacgacgacgaagcggcgactgtctggtcagcttcggcgcgcagtatagagggtttgcgcgccgctgtcaccctcggctgtgggtaagccgtgattaacgcgccacttccaccttcgccagtttttcgtagtagcatgcaattgcactgtgatcggccgtgcccaggccatcggcacgaagcgcctgcatcatctccatgaccgccgcggtcagcggcagctgtgcgcccacgccgtgggaagtatccagcgcgttcgccagatctttaatatgcaggtcgatgcggaaaccgggtttgaaattgcgatccatgaccatgggcgctttggcatccagcaccgtactgcctgccagaccgccgcgaatagcctggtagaccaggtccggattgacgcccgctttggttgccagcgtcagcgcttcagacatggcggcaatgttgagtgccacaatcacctggtttgccagcttggtcacgttacccgccccgatctccccggtgtgtaccacggagcccgccatggctttcatcaggtcgtaaaatttatcgaaaatagctttatcgccgccgaccatgaccgacagcgtgccgtcgatggctttcggctcgccgccgctgaccggtgcatccagcatatcgacgcccttcgccttcaacgcctcgctgatttcacggctcgcgagcggtgcgatagagctcatatcgatcagcaccaggcccggtttcgcgccgtcgataatgccgttttcacccagcgcgacttctttgacgtgcggggagtttggcagcatggtgatgatgacatcgcactgctcggcaatggctttcgcggtggtggctgcctctgcgccagccgctatcacctcagccacggcctgtggattatgatcggagaccaccagcgagtaacctgctttgatgaggttcttactcattggtttacccatgatccccaggccaataaaacccactttcagcgtcataatctgtttcctcaatgatggttattttttaaaagcgtccgctaatttctgcgtagccgagcggaaaacgccgaggtcgctgccgacggcaacaaacgtggctccccactccaggtagcggcgggcgtcagcctcaaccggcgccagaatgccgcacggcttgccgtgcgctttggcgcgggcaaagatgtgctggatcgcgcgctgcacgtcagggtggctggcgttacccagatggcctaaggcggcagccagatcgcttggaccgacgaagatcccgtccacgccggttgtggcggcaatcgcgtcgacgttatcgacgccctgctggctctcgatctgaaccagaatggtgatgttgctgttggactgcgcgaaatagtccgggacggtgccaaacatattggcgcggtgcgaaacggaaacgccgcggctcccttcgggaggatagcgcgttgacgccacggccagcgccgcgtgctcttccgtctccacaaacgggatcaggaagttgtagaagccgatatccagcagacgcttaataatcaccggttcgttggtggggacacgcaccaccggggcactgttgctgcctttcagcgccatcagctgcggaataaacgtgctgatatcgtttggtgcatgttcgccgtccagcaccagccagtcgaaaccggccaggcccagcacttcggtgctgatagggtttgccagcgcggaccagcagccaatctgaatctggtgcgccgcgagagccgctttaaatttattcgggaagatagcgttattcatcgtatttacctttttaattccgcagcctttttcagcatcattttatttattcagacaccgcgccatcatgatatttattattcggacatattctggcgtaataaaatcgtcattcagtataagatgcaatccacgaccgcacattgttttaatgctcaggtattacgctattttttgataaaaatttttgcatatgcacaaagcactgggcgctaatgcacagaatcaaggattacgggctcgcgagcgatcgggatcacattttgatattgaatctgctgacatgctttatttctgaaagccgcgtatttatttctaccatcagaaaaatggctgaacctattatcagaattttgctggagaatactgaccaatggccgacattgaaattcgacaggcaccgccgacggcgttttatataaaagtgcacgacgccgataacgtggcgattatcgtcaacgacaatggcttaaaagcaggaacccgcttcccggacgggctggaactgactgagcatgttccgcagggacataaagtcgccctggtggatatccctgctgaaagcgaaattgtgcgttacggtgaagtcatcggctatgccgttcgttcgataccgcagggaagctgggtggaggagtcgctggtggcgctgccagaagcgccgccgctgaacacgcttccgctggcaacccgcgtgccggaaccgcttccccctctggaaggctatacctttgaagggtatcgcaatgcggacggcagcgtcggcactaaaaatctgctcggcattaccaccagcgtgcactgcgtggcgggcgtcgtggattacgtggtgaaaatcatcgaacgcgatctgctgccaaaatacccgaacgtcgacggcgtggtgggcctgaaccacctctacggctgcggcgtggcgattaacgcgcccgctgcggtggtgcctatccgcaccatccacaatatcgccctgaaccccaactttggcggcgaagtgatggtcattggcctcggctgtgaaaaattgcagccagaacgcctgctgcaggggaccgaggatgtcaaagccatcccggcagacgaggtcagcatcgtgcgcctgcaggacgaacgccacgtcggtttccgctcaatggtcgacgatattttgcaggtagcagaacgccatctggacaagctcaaccgccgccagcgcgaaacgtgcccggcgtcggagctggtggtcggaacccagtgcggcggcagcgatgccttctccggcgtgacggccaacccggcggtgggctttgcatccgatctgcttgtacgctgcggcgccacggtgatgttctccgaggtgactgaagtgcgtgacgccatccatctgctgacgccgcgcgccgttaataaagaggtcggcaagcgactgcttgaggagatggcctggtacgataactatctcgatatgggcaaaaccgaccgcagcgccaacccgtctccgggcaacaagaaaggcggcctggcaaacgtggtggaaaaagccctcggctctattgccaaatccgggcagagcgccattgcagaagtgctctctccgggccagcgcccgacgaaacgcggccttatctacgccgcaacgccggccagcgattttgtgtgcggcacgcagcaggtggcatccggcattacggtacaggtctttaccaccgggcgcggcacgccgtacggcctgatggcggtgccggtgatcaagatggcgactcgcaccgagctggcaaaccgctggtatgacttaatggatattaacgcgggcaccatcgccaccggagaagagagcattgaggacgtgggctggaagctgttccacttcattctggatgtcgccagcgggcgaaagaaaaccttctcggaccaatggggattgcataatcagctggcggtgtttaacccggcaccggtgacgtgattttccgtcccacatctatcccgcatttaggtaacccgtcggacacgccgcaaaccttccaggttgaggcgatacctgctagctaaaagacacataacgatccgtaggccgggtaaggcgcagccaccacccggcaaaacaggcagcaggagcttactccccctgctgctccagcgcatacttatacaacgcatttttcttcacgccgtgaatttctgccgccagcgcagcggctttcttcagcggcagttccgactgcagcaacgctagcgtgcgcagcgcgtcggcaggaagggcgtcttcttccgccttgtgcccttcgacgatcagcaccatttcacccttgcggcggttttcgtcttccttcacccacgccagtagctcgcccaccggcgcaccgtggatggtttcccaggttttggtcagctcgcgcgccagcaccacgtagcggccttccccccagacggtcaccatatcttccaggctctccagcaggcggtgcgtggattcgtagaaaatcagggtgcgcggttccgcttccagctcttttaagacgtcgcggcggcctttggatttagcaggcagaaagccttcatagcagaaacggtcagacggcagacctgcggcgcttaacgcagcaatcgcggcgcacggtcccggcaggggcacaacgcgaataccggcttcgcgacaggtacgcaccaggtgatagcccggatcgttgatcagcggcgtaccggcatcggagaccagggcaatgttctgcccctctttcagcttcgccaccagcgtttcggctttttgttgctcattgtgatcgtgcagcgcaaacaaacgggcgttaatcgcgaaatgttgcagcagcaggccggtatggcgggtgtcttcagcagcaattaaatcaacagcttgcagtacggtgagcgcacgttgggtaatatcagacaaattcccgataggagtaggtacaatataaagctggccttgagaattatctgccgtttcgtgttgtttcattgtttcgtccgtattgccgatttaatattgagcattgcgtaaaaaaaatcactggatacagtatggtaccgttaacgtttcttcgaaaaaaagccacgcgcagcgtgccgcttctgctggcagccctgatctttgcaggctgtggcacccaggcacctgaccagagcaccgcccatctccagggttctgctcaggctgattctggcttttatctgcaacaaatgtcgcagagttcaaatgataccaagaccaactggcaattactcgccattcgtgcactgctgaaagagggtaaaacccagcgggcagccgaactgtttaaccagttgccaaaagatcttaacgacgcacagcgtcgcgagcagagcctgctctctgccgagctgaaagtcgcgctgaaagattacgccgccgcgaagaagatcctcggtgatatcgacgtaagcgcgctggataaaaatcagcaggcgcgcttctggcaggcgggtattaccgctgagcagggacgcccttccctgacgctgctccgcgcgctcgtcgcgcaagagccgctgcttggcggtgctgataagcagaagaatattgatgccacctggcaagcgctagcgtcgatgacgcaggaacaggcgcaggcgctggtcatcaacgccgatgaaaacgtcctgcagggctggctggatctgcagcagatgtggtttaacaaccgcagcgatccaaaaatgttgaaagccggcattacggactggcagacgcgctacccgcaaaacccgggcgcgaaaatgctgccaacccagctggtgaacgtgcagaactttaagcccgcttcgaccagcaaaatcgccctgcttctgccgctcaacggccaggcggcggtgtttggacgtaccattcagcaaggttttgaagcggcgaaaaacggcacgacgtcggtagccggcagcgccgttcccgcacaggcagcccaggcggctaatgtgaataatgatgttgtcagcccatccgccgcagagaccagcgacctgaccacggcgcaagcgccagcgcagggcacgatgcaaaaccctgtgacggccccgacgacgcctccagctgaagctgcaccggctacagcagcacctgcggcccaggctccggccgagacgcaaacggcaccagctcctgccacaacagcagaacagcctcaacagcagcctgcacaacccgcggctcaacctgccgcgcagccgcaggccgtggcaaccaccagcgccaacccgggcgctgaattgaaaatctacgacaccagctcgcagccgcttgaccaggtgctggcgcaggtacagcaggacggggcgagcatcgttgtcggtccgctgctgaagaacaacgtggaagagctgatgaagagcaataccacgctgaacgtgctggcgctcaaccagccagagcaggttcagaaccgggccaatatctgctacttcgcgctctctccagaagatgaagcccgcgatgcggcgcgtcatattcacgagcagggtaagcaggctccgctgctgctcatcccacgcagcacgctgggcgatcgcgtggccaatgcctttgccgatgagtggcagaagctgggcggcggcgtggtgctgcagcagaaattcggttccgtctctgaactgcgcgcaggcgtaaacggcggggcgggtatcgcccttaacggtagcccggtcaccgcgagcctgccacagcagcagggcgtgacgattggcggcctgacgatccctgcgccgccaaccgacgcgcagattagcggtggcggtaaagtggatgcggcctatatcgttgccacgccgcaggagatcgcctttatcaaaccgatgattgcgatgcgtaacggcagccagagcggcgcaacgctctacgccagctcccgcagcgcacagggcaccgcaggcccggatttccgtctggaaatggacggtctgcagtacagcgaaatcccgatgctggccggcagcaatccatccctgatgcagcaggcgctgagcgcggtgcgtaacgattactctctggcgcgtctgtatgcgatgggggttgatgcgtgggcgctggcgaaccactttacccagatgcgtcaggtgccgggcttcgagcttaacggcaacaccggcgatctgaccgcgacccaggattgtgtgattaacaggaagttatcatggctcaaataccagcaggggcagatcgtcccggccagttaagccgcaaacaaaccggcgatgcgtgggagttaaaggcgcgtcgctggcttgaaggcaaaggactgcgttttatcgccgccaacgtccgtggacgtggcggcgaaatcgacctgatcatgaaagacggtcaggtcaccgtgtttgtagaagtgcgctttcgacagtcctcccgttttggcggtgctgccgccagcgtgacgctcgccaaacaacataaattattacagactgcacacttgtggcttgcccgccataatgggagttttgatactgtggattgccggttcgatgtgatagccttcaccggaaatgagatcgaatggcttaaaaacgcttttggcgaagacgcataattaagatttaaaagggataacgtgctcgaaagaattaaagtgtgcttcacagaaagcatccagactcagattgccgcggcggaagcccttccggatgctatctcgcgtgccgcaatgacgctggtgcaatccctgctaaacggcaacaaaatcctctgttgtggcaacggcacgtcagccgccaacgcacagcattttgctgccagcatgatcaatcgttttgaaacagaacgccccagtttacctgccattgcacttaataccgataatgtggtcttaacggcgattgctaacgatcgtctgcatgacgaaatttacgcaaagcaggtgcgagccctgggtcatgccggagatgtgctgctggctatctccacgcgcggcaatagccgggatatagtcaaagctgttgaagccgccgtcacccgcgacatgactatcgtggccttaaccggctatgacgggggtgaactggcgggtctgcttgggccgcaggatgtggaaatccgcattccctctcaccggagcgcacgcatacaggagatgcatatgctcacggtgaactgcttatgtgacttgatcgataacacgcttttccctcaccaggatgattaaggagttcttatgaaggctttatcgaccctcgcagtccttatgtctgcattactgcttcagggatgtatcgctgcggccgttgtgggtaccgccgcagtaggcaccaaagcggcaaccgatccgcgcactgtgggaacacaggtggatgacggtacgctggagctgcgcgtcaacagtgcgctgtcgaaagacgaacagatcaagaaagaggcgcgtatcaacgtgacggcttatcagggcaaagtgctgctggcaggccaggcgccgaatatggagctcgcctcgcgtgcgaaacagattgcgatgggcgttgaagggaccacagaggtgtttaacgaagtgcgtcagggcaagccaattggcctgggtgatgcctcttccgatacctggatcaccaccaaagtacgttcccagctgctgggctcggaccaggtgaaatcttctaacgtgaaggtgacaacggaaaacggtgaagtgttcctgctgggtctggtgaccgaacgtgaagggaaagcggcggccgatatcgccagccgggtgagcggcgtgaagcacgtcaccaccgcgtttacttacattaaataaaaaaatcccctcaagtgaggggatttttttgtaggcccggtaagcgtagcgccaccgggcgtttttcacagaagcgcaatgcttcccaccatcaccccgctcaacgccaccagccccgcggtgagccacagcgctttcgccgggaatgacttacgcagcataatcagcgacggcaggctgatggccggtaacgtgatgagcaatgccagtgccggtgcggtgcccatgccggccagcatcatggtctgaacaataggaatttctgcggcggtagggatcacaaacaggcagcctgcaacggccatcgcaatgacccacaacagcgtgttgtcgatagcgccatccgcatgcgggaagagccagacgcgcgccgccccgagaaccagcaccgccaggatatagaccgggatggtgctccagaaaagctgccatagcgccctgccccagcgcgcaaagaacccgccctgcggctcgctgacgtccagctcaacagacgcggactctggcgccttatccttcaccagattctgcaccagcgtcgccaccaccagcacggtcagcagtccggccaccagacggatgaacgcgaaatgccagcccaggacaaagcccataaacaccagcgtcgccggattgagcagcgggttgcccatccagaacgccagcgcgccgcccatcgacacgcgctggcggcgcatccctgccgccacgggcgcagcacaacaggagcacatcatgcccggcagggagaagatcgttcccagcagcgtcccctgaaagcgcggctgtccgagggttttcatcagccagttgcgcgggatcagcacctgaatcagtgagcccaggatcacgcctaagacggcggccttccagacggcaaggaagtagaccatggcatagtcccacgctgcctgaagcgggctggcatccgcctgagcgagaatagatttaccgatgctgtgcgtttcggcggcggtgaaggctttgccgtagtacggctgccatttcacgtaccaaaggccaacaatgaccacgagaaagaagagtgcgggcttccaccattgaacaggtgttgccgcctgagatgaagactgaccagtcatagcattccccggagagtatgagtaattagccgggggagtttacgcctcgccctgcgcgatttcacgcagttttgccgaagggataatgtttacgcccgctttcgacggagccagtccctcttttaacagcgcacgcgcgacgtcccgcgcctcgatagatttcaagttgccgggcaggatccgaaacagcggggcaaatatcgactcgttaaagcggcgctcgtcccggtggccgatcagcattgaggggcgcactatcgtcagctgctcccatttctgcgcaatcagcgcatcctccatcttgcccttcaccttgttgtagaagaaaggcgatccggcactggcgcccagcgcgctgaccaccagaaaatgtctggctcccagctttttcgccgtaagcgcggtgtccaccaccagcgtatagtcggcgtggataaatgcctctttgctccccgcctcccgccgcgtggtgcccagacagcaaaaggcgatatcaatcgggtcctggacctgcgccagcgcatccgtcagctgaggatcgtgcggattaaagaccccggagatgtccaccagcggtcgacgcgtcggggcggcgatgtagttcacgcggcgatcctgaatcagcagccgcagcagatgatcgcccactaatccggtagcaccggtaatcaaaacctgactcatcgtatcccctttacagaattgtccgtttgcgaactcggcgtcgtcgaccacacttagaagtctgttacaggtaagtatttaccacaagcggagaaaaatcagtctgaagccaaaacaacggaggaagcatgggcaagaaaatcgcagtcttgattaccgacgagtttgaagattcagaattcacctctcctgcagaggcgttccgcaaggcgggacatgaggtcatcaccatcgagaaagaggcgggcaaaacggtgaaaggccataagggcgaggccagcgtgaccatcgacgagactatcgataacgtgagcccctcagattttgacgccctgcttttacccggcggccattcaccggattccctgcgcggagacgagcgcttcgtgaccttcacccgggactttgtctctaccggcaaaccggtctttgccatctgtcacggcccgcagctgctcatcagcgcggaggttgtacgcgggcgtaagctcacggcggagaaaccgatcgttatcgatctgaaaaatgcgggcgccgagttttacgatcaggaggtggtcaacgacaaagaccagctgatcaccagccggaccccggacgatctcccggcgtttaaccgcgaagcgctacgcctgctcggcgcgtaaccagtgcagcttcttgccaaagcccagggtgttgtcggtaaatttcagctcatcgaggcggatttcccacaccggggcttttagcgcagcggcgaccggaaagcggcgcgtgtagtgcttgcgacgcgcgtcgctctcttctccgtccaggcgacggatttcccccttaaactgtaccccacggatcagcgcgactgtcttcggctggccatttaccgtgcccgcgacttttgcctgctgaccagccatctgcgcatgacgcgttttgtcttcgctcatgacgtaaaatgcgacgcgctccggatcgtagtagtaaaacgcgtttgcgcaccacatctcaccctcgctgtagacgcaccaggtgacgacgtgctgcttcgccagccagcggttaatggcggccagtgtttccattttcgttctctctcatgctatggtgcgttcaccttaacatactgaatctgtttaacgtgtgctggtttctctatcttgtccgaaccgctgataacgcactctacaccgggatcaccaccgatgtggcgcggcgttttttacaacatcaaacggggaaaggggcaaaagcgctgcgggggaaaggagaattacagctcgccttttcggcgcccgtcggtgaccgatcgttggcgctcaggctggaataccgcatcaaacagctgacgaagcgccagaaagagcgcctcgtgaccggagacggctcctttgaggcgctacgcgagagcctgattaaaagcgattgaaatggtcgtggtattcgaccagaccattgacgccgttgagcgcgtcgtccgccagacggtgcacctggaaagcggattccgtacccggccagcggcagcgcagatcgtaatgcgcggcctgctcgaagcccaaacggccatagaatgccggatcgcccagcgttacaacggccgcataaccgaactcattgagcgaatccagcccttcatagaccagctggcgcgccagcccctgcccgcgatagttttcatccaccgccagcggtgccataccgacccactgcagctcttcgccctgaacgatgaccggactgaaggcaacatagcccaccacctgaccttcatcatcggtggcaaccagccccagcgtgatcaggccgtcttcacggagatcgtggaccagttgggcttccgcatcgctctcaaaagagcggcgtaataacgcatcgatacccggtgcatcaatcccaatttcgactcgaatcagcatggctcacctactgaagtgtgtttactgtccggcggggttttcagcccggcctcaacgaaatctgccatttgcattaacattacgcgcagcgctttcggcatctgctccagctcaatggcatccattaaattcttaacgtacaggcccagctccgtgtcgccttcaatcaccagacggcgctggaagaagagcgtatccggatcctgcttgcgcgcggcgatcatcagcagatcgctggcgttggcgctaaagctcacgtccgcctcggcggtttcgcggacgatcagctggtcattctcaacggaggtaaaccagcgcagcccgatgtcacgtacctcaatgctcaaccagcggccttccaggaattccagctcgccatcctgcagcgcctggcggaactgccagctcaggacctgctccagcacctgacgtttaagcgcgaacggcgccagctttaccggcacgctcagcattgatgggccaaattgtacgagacgtgaacgcagtttatccagcacgagctttactccctgatatctatagtcctgctattttgccatatccgacgcataacatagcggcgtaaatcaacaaaccgtcgtccggacaacctcattattggtgccatcaatacgccattagctgccttaaatcaaaaattgtcgcgtatgggttaattaaaatcccagctcgttaacatttttgcgatcgacaacatcaggataaattatggagctgctctgccctgccggaaaccttccggcgcttaaggcggccatcgaaaatggggccgatgcggtctatatcgggctgaaagatgacaccaatgcccgccattttgctggcctcaactttacggagaaaaagcttcaggaagccgttaacttcgttcaccagcaccgccgcaagctgcatatcgccatcaatacctttgctcatcctgacagctacgcccgctggcagcgcgcggtggatatggcggcacagctgggtgccgatgcgctgattctggccgacctcgccatgctcgagtatgcggcagaacgctatccccatattgagcgccacgtctctgttcaggcatctgccaccaacgaagaggccgtacgtttttatcaccgaaactttgacgtggcccgcgtggtgctgccgcgcgtactctctattcatcaggttaagcaactcgcacgcgtcacgccagtgccgctggaagtttttgcctttggtagcctgtgtatcatggctgaaggccgctgctatctctcctcgtatttaaccggtgaatcccctaataccgttggcgcctgctcgcctgcccgctttgttcgctggcagcaaacgccgcaggggctggaatctcgcctgaatgaggtactgattgaccgctatcaggacggtgaaaacgctggctacccgacgctgtgcaaaggccgctatctggttgacggcgagcgttatcacgcgctggaagaacccaccagcctcaacacgctggaactgctgccggaactgctggccgctaatattgcctcagtgaagattgaaggtcgccagcgcagcccggcctacgtcagtcaggtggcgaaagtctggcgtcaggccattgaccgctgcatcgcagatccgcagaactacgccccgcaatcggcctggatggagacgctcggcgcaatgtctgaaggcacccaaaccacgcttggcgcgtatcaccgtaaatggcagtgagataaccatgaaatattcattaggaccggtgctctactactggccaaaagagacgctggaagatttttatcaacaggccgcgacgagcagcgccgatgtgatttaccttggcgaagcggtatgcagcaagcgccgtgccaccaaagcaggcgactggctggagatggcgaaaagcctggccgggagcggcaaacaggtggtgctctctacgctggcgctggtacaggcctcatctgaactgggtgagttgaagcgctacgtggagaacggcgagtttctgctggaggccagcgatctcggcgtggtgaacatgtgtgccgagcgcaagctgccgtttgtcgcgggtcatgccctgaactgctacaacgcggtgaccctgcgcctgctgctcaaacaggggatgacgcgctggtgcatgccggtggaactctcccgcgactggctggcaaacctgctcacgcagtgtgaagagctgggcattcgcaacaagtttgaagtggaagtgctgagctacggccatctgccgctggcctattccgcccgctgctttaccgcacgctcggaagaccgtccgaaagacgagtgcgaaacctgctgtattaagtatccgaacgggcgcagcatgctgtcgcaggagaatcagcaggtgtttgttctcaacggtattcagaccatgagcggctatgtctataacctgggcaacgagctggcgtcgatggacgggctggtcgatatggtgcgcctgtcgccgctggataccggcgtgttcgcgatgctggacgccttccgcgctaacgaaaatggcgctgctccgctgccgctgacggcaaacagcgactgtaacggctactggaagcgtctggccgggctggaacttcaggcttaaaaaaggctcactttgttaacaacggttatcattttttaatgcagtattaaagattcaccgtcgacaaagtgagctgttatgactgacaaaacccttccgttttcggtgctggatctggcgccgatcccacaaggctcctcggcaagagaagccttttcgcactctctggatctggctcagctggccgaaaagcgtggctatcaccgctactggctggccgaacaccacaacatggtgggcattgccagcgccgccacctcggtactgattggttatctggcggcaaacaccaccacgctgcacctgggctccggcggcgtgatgctgccgaaccacgccccgctggtgatcgccgagcagttcggcacgctgaataccctctatccgggccgtattgatttagggattggccgtgcgccgggtagcgatcagccgaccatgcgcgccctgcgccgccatatgagcggcgatatcgacaacttcccgcgcgacgtggccgaactggtggactggttcgacgcgcgtgacccgaacccgcacgtgcgcccggtaccgggttacggcgagaagatcccggtatggctgttgggctcaagcctctacagcgcgcagcttgccgcccagctggggctgccgtttgcgtttgcctcgcatttcgcgccggatatgctgcatcaggcgctgcatctctaccgtacgaacttcaaaccgtccgagcgtctggagaagccgtacgcgatggtgtgtattaacatcattgccgctgacagcaatcgcgacgcagaattcctgtttacctctatgcagcaggcgtttgtgaagctgcgccgcggcgagacgggccagcttccgccgccggtggagaatatgcatcagctgtggtctgcttcagagcagtatggcgtacagcaggcgctgagcatgtcgctggtgggtgataaagcgaaagtgcgtcacgggctggaagcagtgctgcgcgaaacgcaggcggatgaaattatggttaacggccagattttcgatcaccaggcacgtttgcactcgtttgatttggccatgcaggtgaaagaggagttggtggggtagcctttttgccaggtggcgcttcgcttacctggcctacggggacgcgtaggccggataaggcgtagccgccatccggcacaaaatgtttactggtacaccggcaacagattaaaactcgacagcacatgtaccagggcattgcccgcgccaaacaccaggatcagcgcaatcatcggcttgccgccccagacgcggaatttcgggctgccgaagcgtttacgtgatttgcgggccaacagcgccggcacaattgccgcccagatggtcgccgccagaccggcatagccgatggcgtacaggaaaccgttcggccacagcaggccgcccacaatcggcggcaggaaggtcagcagcgcggttttgaagcggcccatcgcagagtcatcaaagccaaacagatccgccaggtagtcaaacaggcccagcgtcacgccgaggaaagagctcgccaccgcgaagttagagaagatcaccagcagcaaatccaggctgcggctgttcagcacgccgctcagggcctgcaccagcacatcaatgttaccgcccttctgcgcaataccgataaactccgggcgcgggatattgcccatcgtcccgagcagccagatgacgtacagcgccagcgccagcagcgtgccgtagaccagacacttcacaatcgtgcgcggatctttgccgtagtacttcatcaggctcggcacgttaccgtggtagccaaacgacgccaggcagaacggcagggtcatcagcaggtacggcgtataggaggtatttacttcggcaacgttaaacagcgtggcaggcgtcacgtgccccagcaggctgccgaaggtcaggaagaaggtgatgaccttcgcgcccagcacgatcgccgtcatccggctcaccgctttggtactcatccagacgataaacgccacgcccagcgcaaagcacagcccggccagacgcgccggtacgttcagcgacatctccgagaaggtgtgatgcagaatcgaaccgcttgccgagatatacgcgtaggtcaggatatagagcacaaacgcgatggacagcccgttcaccaggttccaacctttgcccagcaggtctttggtgatggtgtcgaagctcgcgccaatgcggtagttcaggttggcttcgaggatcattagcccggaatggagcatacagaaccaggtaaagaccagcgcggccagcgaccagaagaaccacgcaccggacatcaccacgggcagggagaacatcccggcaccaataatggttccgccgatgatcaccacgccgccaagcagcgaaggtgacgtttgggtggtggttagtgtcgccatacagccttttctccagtcaatcatgcggttctgcattttaatgcgacgcactgtaccagtacaagagtacaaagggaataaaaaaagccccgatagcatgtatcggggctgtatattttactttacgtcagaagcgtaaggcttacgcgtcaccgaaacgacgacggctggtgccttcttcacgacgcgggccacggctttcacggcgctcgccggagaaacgacgaccttcaccaccgcgaccttcgctgcgaccgccttcacgacgctcgccgccgaaaccgcgaccaccgccacgacgttcgccgccacggtcagggcgtggctgtgcatcgcccagcagctgcatgttcatcggcttgttcaggatgcgggtacgcgtaaagtgctgcagtacttcacccggcatgcctttcggcagctcgatggtagagtgggaggcgaacagcttgatgttaccaatgtaacggctgctgatgtcgccttcgttagcgatagcgccaacgatgtgacgaacttcaacaccatcatcacggcccacttcaatgcggtacagttccatatcgcctgcgtcgcgacgttcacgacgaggacggtcttcaccaccacgctctggacggtcaccacgtgggccacgatcgttacggtcgccacgacgttcgaagcggtcgtcacggtcacggaattcacgcttaggacgcatcggtgcatctggtggcacgatcaggctacgttcgccctgagccattttcagcagtgctgcagccagggtttccatgtccagctcttcgccttcagcaacaggctgaatctgcgacagcagcgcacggtactgatccagatcgctgctttccagctgctgctgtactttggcggcgaatttttccagacggcgtttgcccagcagctctgcgtttggcaggtccgcttctggaatggtcagcttcatggtgcgttcgatgttacgcagcagacgacgctcgcggttctcaacgaacagcagcgcacggccagcacgacccgcacgaccggtacggccgatacggtgaacgtaagactcggaatccatcgggatgtcgtagttaacaaccaggctgatacgctcaacgtccagaccacgtgctgccacgtcggttgcaatcaggatatccagacgaccgtctttcagacgctccagagtctgctcacgcagggcctggttcatgtcgccgttcagcgctgcgctgttgtagccgctacgctccagggcttcagccacttccagggtcgcatttttggtacgaacgaagataatcgccgcatcaaaatcttccgcttccaggaaacgtaccagcgcttcgtttttacgcatgccgtatacagaccagtagctctggctgatgtccgggcgagtggttacgctggactgaatacgcacttcctgaggttctttcatgaagcgtttggtgatacgacgaatcgcttccggcatggtggcagagaacagcgcggtctgatgaccgtccggaatctgcgccatgatggtttcaacgtcttcgatgaagcccatacgcagcatttcatctgcttcatccagtaccagaccgctcagtttagagaggtccagggtaccgcgcttcaggtgatccagcagacggcccggcgtaccgacaacaatctgtgggccctggcgcagggcgcgtaactgcacgtcataacgctggccgccgtacagggcaaccacgtttacgccgcgcatatgtttagagaattccgtcatggcttctgcaacctgaacagccagttcacgggttggagccagaacgaggatctgcggtgcacgcaggtccggatcaatgttgttcagcagcggcagcgagaacgctgcagttttaccgctaccagtctgggccatgcccagcacgtcacgaccagaaagcaggtgtgggatacactcagcctggatcggagatggtttttcgtaacccagatcgttaagggcttcaaggataggagccttcaggcccagatctgcaaaagtggtttcgaattcagccatgtagtacgagtgcctcaatgtcaatggcggccagtctacttagctcatcgtgaaaatgattagcaattttcattgaaaagtgtgaaccggctcaaagtaggtgtattgacgaacaacaacgccctcaccagttaaggtgatggcaatcaaaagattacgggctgatgtttatgtcgtcagctattgctggtccgattctgccaggtcgtcttgctcctggcccaagagcgataattccaacaatgcataacggtgctcaacgaagttgtgtacgttgttagcaaccgctaatttgaacagtgccgtagcgctgtccttatcccccagacttaggtagtacttacctaaatagaagttggtttcactgagatgctcagcgagcgaggtgttatccgttgcgtccgccttgaggcgttccatcagcgttgcttcgctaatgttgcccaggtagaactcgacaatgttccatccccactgttccttgtccgatttatcgaagcgctgtttcagtgcttcttttgcctgcttctcatcgagcttccgctcaacgatgtaaagccacaggctacggaaaggatcattaggatcgtcttgataaaacgccagcagatcatcttgcgctaacttgtcacgaccgccgtaatacaatgcgataccgcgattcaagtgcgcgtagttgtaagttggatcaagctcaagtacagaatcaaacgcttcataggcagcatcaaaattgcctgcctgcgttaaataaatgcctaagtaattgaatacttcaggcatatcaggtcggatagccagcgcttgtgaaaaatcatttcgcgccaatgccctcagaccgagactatcatacaacactccgcgctcatataaaagctgtgcgcgttcgtcatcggttaaagcccgactggcaagtatttgttccatgcgtgccaggatcacttcctgctgcaaagtcggttgcaatggcactgcgaggacttcgctcttacgccaggcatagttgctgcatcctgccagcgttaaagctgtcgcaacgaaacaccagcgcaaaaaaggcttcatttcccactcccgaagacaactattggatgaacgtcctgtcccccggcggcttaacaaggcgtcctgcctgataataggccctccgcagagcggagggcaaatggcaacttactcgccttgctgttctgctgcctgtgcttctggcgcagcagctggctgagactgctcggttgcttctttaatgctcagacggatacggccctggcgatcaacttccagaactttaaccggcacttcctgacccatctgcaggtaatcggtcactttctcaacgcgcttgtcagcgatctgagagatgtgaaccagaccttctttaccgccgccgatggcaacgaacgcgccaaagtcaacgatacgggtcactttacctgcatagacgcggcccacttcgatttctgcagtgatttcttcgatgcgacggatcgcgaatttcgctttctcgccgtcggttgctgcgatcttcacggtaccgtcatcttcgatttcgatggtggtgccggtctcttcggtcagtgcacggataacggaaccgcccttaccgataacatctttgatcttgtctggattgatcttgatggtgtgaatacgcggtgcgaattcagagatatcaccgcgtggcgcgttgatagcctgttccatcacgcccaggatgtgcagacgtgcacctttagcctggttcagcgcaacctgcatgatctctttggtgataccttcaattttgatatccatctgcagcgcagagataccgtcgcgggaacccgctactttgaagtccatatcgcccaggtggtcttcgtcacccagaatgtcagacagaacaacatagttgtcgccttctttcaccaggcccattgcgatacccgcaacggcggctttgattggcacacctgcatccatcagcgccagagaggcaccacacacggaagccatggaagaagaaccgttggattcggtgatttcagacaccacacgtacggtgtacgggaatttgtctgcttctggcatcactgccagcacgccgcgcttcgccagacgaccgtgaccaatttcacgacgcttcggtgagccaaccatgccggtttcaccgacggagtacggagggaagttgtagtggaacaggaagctgtcagtgcgctcgcccatcagttcgtcgatgatctgcgcgtcacgggctgtacccagggtcgcggtaaccagcgcctgcgtttcgccacgggtgaacagcgcggaaccgtgagtacgtggcagcacgccagtacgcacgtccagaccacggatcatgtctttttcacggccatcgatacgcggctcgccagccagaacgcggctacgaacaacgtttttctcgatagcgtgcaggatttcgccaatttcgttagcgtccagcgtttcgtcttcggcaaccagggtcgcggttacttcagatttgatcacatcaacctgagcgtaacgctcctgtttgtcggtgatgcggtatgcatcgctcagacgagattctgccagtgcagcaacgcgtgcgttcagcgcgtcgttggccgcttctggctgccagtcccaacgtggtttaccggcttctttcaccaggtcgttgatgttctggataacaacctgctgctggtcatggccgaagaccacagcgcccagcatctggtcttcgctcagcagttcagcttcggattcaaccatcagcacagcggcttcggtacccgcaaccaccaggtccagcttactttctttcagctcttcctgagttgggttcagcacgtactggtcgttgatgtaacccacgcgcgcggcaccgattggaccattgaatggaataccagacagtgacagggctgcggacgcaccgatcatcgccacgatgtccgggttaacctgtgggttaacggaaacaacggtcgcgataacctgcacttcgttgacgaagccttccgggaacagcgggcgaaccgggcggtcaatcagacgcgcgatcagggtttcgccttcgcttggacggccttcacgacggaagaagccacccgggattttaccggcagcgtaggtacgctcctggtagttaacggtcagcgggaagaagtcctgacctggtttagcttttttctggcccacaacggtaacgaataccgcggtgtcatccatgcttaccataacggcagcagtcgcctgacgtgccatcatgccggtttccagcgtgacggtatgttgaccatactggaatttacgaacgatcggattcagcaaagttctgtcctttcttaaatgtttgacagcacaccgccggtgtgctgtcgatttaacccgaccttcttcgcatcctcgcgactaatgacaaccaacacccccctgggtgaagcctctcattagccgcgcgaacctctgcaatgaagatcatttatagcaacaatacaatagtttccagtgaattgctgccgtctgcttgaaaaaaggggccatcaggcccccttttctgaaactcgcaaaaattagcgacgcagacccagacgctcgatcagcgcggtgtagcgtgcaacatctttacgtttcaggtagtcgagcagtttacgacgctgagaaaccatacgcagcagaccacgacggctgtggtgatcttttttgtgctctgcaaagtgaccctgcaggtggttaatctgtgcagtcagcagtgcaacctgaacttcggtagaaccgctgtcgttagtaccacgaccaaactcagaaacgattttagctttagcttcaacgcttagagacattttcaaactccaaagtataaagaatgtaaggatgccgatctctaattcagcaatcccatgtacgccccgcagattgttaaacaatttaccaggcgttaagcggcgatattctactcgtctcccctgcttatcgcaaggtgagccgttattaccgtcacgcgtcgaccggatattcgacgaccagacgacgcggcgcaacgcgcccttcgccatccatttcgcccatgccgatgaatttcccttcgtcaccttcagtcacgcgtaccaggccttccagcggcgcatctgacgtacgaaccgggttgccgttcttaaagtaaacggacgatgttaaaggaagattaacaaccgggaagtccgcagccggactgtccatcggcatcagcagtgggtcgagcagctctgccggcgcgatcccctgagattccgcctgttcaaccagctcgcgcaactgttccagggtcaccattcgctccaccgggtacttgctcaccgcaaggcgacgcaggtaaatcacatgtgcgccgcagcccaccttttcaccgaggtcatcaatgatggtacgaatataggtccctttcgaacagtgcacttccagctccagctcatcgccttcgtggcgaataaagagcagctcatacacggtaatcggacgggcttcacgcgggacgtcaatgccctggcgcgcatattcgtagagttttttgccctgatacttcagcgcagaatacatcgacggcacctgcatcgtctccccgcggaaactttccagcgccgcatcaagctgttccgcggtgaacgtcaccggacgttcctccacgacctgaccatccgcgtcggaggtatccgtgcgctggcccagcttagcgatgacgcggtaacgcttatcggagtcgagcaggtactgggaaaactttgtcgcctctcccaggcagatcggcagcatgccggttgccagcggatcgagcgcgccggtgtggcccgctcggttggcgttaaaaatacgcttcactttttgcagcacgtcgttgctggaagcgccctggggtttatccagcagcagcacaccatgcacgtcgcgaccgcgacgacgaggacgactcatcagtcctccttgctgtcgtccgccgggttaacacgacgctcatcgtcatgtttcaccacgctggtcaccaggttggacatacgcataccttcgaccagcgagttgtcgtagaagaaggtcagttcaggcacgatacgcaggcgcatcgctttgccgagcagagagcggatgaaaccagaggcttcctgcagcgctttaatgccgttcttcactgcggcttcgtcctgatcgttcaggaaagtgacgaacactttggcataggccaaatcacgggacatttccacaccggaaacggtggtcatcatgccgacacgcgggtctttgatttcacgttgcagaatgagtgcgatctctttctgcatttcctgcgctacgcgctgagggcgaccaaattctttcgccataataaattctccagacaaaaaaggggctaaagcccctttttgaaattattgccgggtggcgcgaggcgatcccggcttacaatcagaaattaagcgatggtacgctgaatttcgatgatctcgaacacttcgatcatatcgccaacgcgaacgtcgttgtagttcttcacgccgataccacattccatgccgttacggacttcgttaacgtcatctttgaagcggcgcagggattccagctcgccttcgtagataaccacgttgtcacgcagtacgcggattgggttgtgacgcttgatgttaccttcggtaaccatacagcccgcgatcgcaccgaatttcggtgatttgaacacgtcacgtacttcagccagaccgatgatctgctgtttcagctcaggagacagcataccgctcatcgctgctttcacttcgtcgatcaggttatagatgacggagtagtaacgcagatccaggctttcggattcaatcactttacgcgcagaggcatccgcacgaacgttgaagccaaccaggatagcgttggaggcagcagccagggtcgcgtcggtttcggtgataccacctacgccagaaccgatgatcttcactttcacttcgtcggtagacagtttcagcaaggagtcggagatcgcttccacagaaccctgaacgtcggctttcagaacgatgttcacttcgtgaacttcgccatcggtcatgttggcaaacatgttctcgagtttagatttctgctgacgagccagtttaacttcacggaatttgccctgacgatacagtgccacttcacgcgctttcttctcgtcacgcacaacggtcacttcgtcaccagcagccggaacgccggacagacccaggatttccactggaatggacggacctgcttccagcacttcctgacccagttcgttacgcatcgcacgaacgcgaccgtattcgaaaccgcacagaacgatatcacctttatgcagtgtaccttcacgaaccagaacggtagcaacagggccacgtcctttatccaggaaggattcgataaccgcaccgctcgccataccgttacggatggctttcagctccagaacttcggcctgcagcaggatcgcgtccagcagttcgtcgataccggtacccgctttcgcagacacgtgtacgaactggctttcgccgccccactcttccggcaggataccgtactgggaaagttcgtttttaacacgatcgggatccgcttctggcttatcgatcttgttcactgcaaccacaaccggcacacccgctgctttcgcgtgctggatagcttcgatggtctgcggcatgacgccgtcgtctgcagcaacaaccagaacaacgatatccgtcgcctgagcaccacgagcacgcatggaggtaaacgcggcgtggcctggggtatccaggaaggtgatcataccgttgtcagtttctacgtggtatgcaccgatgtgctgagtaataccacccgcttcgccagaggcaaccttggtagagcgaatgtagtcaagcagagaggttttaccgtggtcaacgtgacccatgatggtcactaccggtgcgcgcggttctgccgcagcacctgtgtcacggtcgctcattactgcttcttccagctcgttttcacgacgcaggataactttgtggcccatctcttccgcaaccagctgtgcggtttcctgatcgatcacctggttgatggttgccatcgcgcccagcttcatcattgctttgatgacctgagagcctttaaccgccatcttgttcgccagttcgccaacggtaatggtttcgccgatcacaacgtcacggttaacggcctgagccggcttctggaagccctgctgcagagcggaacctttacgcttaccgcctttaccaccgcgaacagccgcacgtgcttcttcacggtcagctttggattccgcgtgcttgttaccttttttcgccggacgcgctgcttttgcattacgaccacggccacggccgccttctacttcacggtcgttatcatcttcagcctgacgtgcgtgctgagaagtggtcacgtgatagtcgctggtgtcttcagactgctcagcggtatcaacaccgttcttctcattttcttctgccatgcgacgcgcttcttcggcgacgcggcgagcttcttcttccagcttacggcgggcttcttcttccgctttacgcttcagctcggcagcttcattttcacggcgggctttttcagcctgggcggttttggtcatttcgtctgtctgttgattgctcactttgtctttttccgcagcgtcacgcttcactttatcacttgcgtcgcgtttcgctttttctgcggcctcacgttcagcttttaattctgcttcacgtttggcggctgcttccgcctcacgctgagcttgttcttccgcttcacgctgtgcctgctcttccgcggcaaggcgctctgcctcttgcggatcacgttttacaaaggtgcgcgtcttgcggacttcaatttgtaccgatttgcttttgccaccggtaccagggatgtttaacgtgctacgcgttttgcgctgcagcgttaacttgtcaggcgtagagccgtgttcacggttcaggtgcgttaacaaggtttgtttttcttgcgcggtcaccgagtcatcagcggacttcgggatccctgcatcagcaaattgctgtaccaggcggtccacggaggtctgaatctcagcagccagcgattttacagttacatcagtcatgctgttccttcctgctacagtttattacgcttcgtcgccgaaccagcaaatattacgtgcggccatgatgagctcgccggctttctcgtcggttaaaccttcgatatcagccaggtcatcaacgccttgttcagcgagatcttccagcgtacaaacaccacgggcagccagcttgaacgcaatcgcacgatcaagaccttccagattcagcaggtcatcagccggcttcttatcgccaaggctttcttcctgagccagtgccagggtggtcagtgcgtttttagcgcgttcacgcagggcttcaacggttggttcatccagaccgtcaatttccagcagctctttcattggcacataggccagttcttccagcgtagagaaaccttcttcaaccagaacagtggcgaaatcttcgtcaatatccaggtatttggtgaaggtatcgatcgccgcatgggcttcagcctgatgcttagcctgcaggtcatcaacggtcatgacgttgagttcccagccgctcagctgtgacgccaggcgtacgttctgaccgttacggccgattgcctgcgccaggttgcccgcttcaacagcgatatccatggtgtgtttgtcttcgtcaacaacgatagacgccacatcagccggagccattgcgttgatcacgaactgcgccgggttgtcatcccacagaacgatatcaatacgttcgccgcccagctcagtagaaactgcctggacacgcgcaccgcgcataccgacgcaagcaccgaccgggtcgatacgcttgtcgttggttttcaccgcaattttcgcacgggagcccggatcgcgagccgccgctttaatttcgataacttcttcaccgatttccggtacttcgatacggaacagttctaccagcatttctggtttagaacgggtcacgaacagctgcgcaccgcgagcttctggacgcacagcgtacagaacaccacgaatacggtcgcccggacggaagttttcacgcggcagcatatcttcacgcaggatcacggcttcagcgttacccggcaacccttcggatttgatctccagggagatgttgtcgcggttcactttcttcaccacgccggtgatgatttcgccttcctgatcgcggaactgatcgacaaccagcgcgcgctcggcttcacgcactttctgcacgataacctgtttagcggtctgggtggtgatacggtcgaaggtcacagattcaatctgatcttcaacgtagtcacccacgttcagactttcgtcttcaaaacgggcggcttccagcgtgatctctttagtcggctgggtcacttcttcaacgattacccaacgacggaatgtatcgaagtcaccgcttttacgatcgatttctacgcgaacatcgatctcttgttcgtattttttcttggttgctgtagccagtgcactttccagcgcttcaaaaatcttctcacgcggcagtgatttctcgttggagacggcttcaacaacagccaaaatttctttgttcatcgcgggcttttcacctcaatccagactgttaaaagtggggaaccaggttcgccttctggatattactcagcgcgaacacttcatctttgccttcgactgtcaccgtgatcatttcaccatcaacggctttgataattccctgccatttacggcggttctgtacggccatacgcagaacgagagccacttcttcaccggtaaagcgcacatagtgctcggccgtgaacatcgggcgatcgaggccaggtgaggaaacttccaggttgtacgcaacggtaattgggtcttcaacatcaagaaccgcactcacctggtggctgacatcagcacaatcatcaacattgatgccatcttcactatcaatatagatgcgcagcgtcgatgtacggccgcgaacgaattcgatgccgaccagttcgtagcccagtgcttcgaccggtgcagtaatcatctctgttaatttttgctctaatgtggacaagcccacccccaagacataaaaaaagggcgtaaagcccagttattctgtagtcagataacaaaaaaccccgataaatcggggctttagataactgaaccctatagccacaactgtggcctggagcactctccgaaagaattttttcaaatccagctacgaaggctctaagtcttcacagtatatttgaaaaagaactttatgggaaagtggttgcgggggccggatttgaaccgacgaccttcgggttatgagcccgacgagctaccaggctgctccaccccgcgcctgaaacgtggcaaattctacgcgttttggacagaatttgcaaataatgctgggatttggtaccgaagacgggacgtaaaatcggcgtttagtatattgatagttgaccccacctgtcaaggcgacttccgccagatcgaacagaccaaaatttttacaaaaaacgcacgagtctcttccggtctccgccaaaagatgattaaatgaatactcacttattttgcataaaaatgcacaagagagcgaaagcggtctctaatcagtcaatcaagcagggttttattctatgacgacgattctcaagcatcttccggtaggacaacgtattggcatcgctttctcaggtggcctggataccagcgctgcactgctgtggatgcgccagaagggagcggttccgtatgcttatactgcgaacctgggtcagccggatgaggacgactatgatgccattcctcgtcgcgcgaaagagtatggtgcagagaacgcgcgcctgattgactgccgtaagcaactggtcgcggaaggtatcgcggcgattcagtgtggtgcattccataacaccaccggcggcctgacctatttcaacaccaccccgctgggccgtgcggtcaccggtaccatgctggttgccgccatgaaagaagacggcgtcaacatctggggtgatggcagcacctataaaggaaacgatattgaacgtttctatcgttatggcctgctgaccaacgccgaattgcagatctacaaaccgtggctggataccgacttcatcgacgagctgggtggtcgtcatgagatgtccgagtttatgatcgcctgcggttttgactataagatgtccgtcgagaaagcctactccaccgactccaacatgctgggtgcgacgcacgaagcaaaagacctggaattcctgaactccagcgtgaagatcgttaacccaatcatgggcgtgaagttctgggatgagaacgtgaagatcccggcagaagaagtgaccgtgcgtttcgaacgtggtcatccggttgcgctgaacggcaaaaccttctctgatgacgttgagctgatgctggaagcaaaccgtattggtggccgtcacggcctgggcatgagcgatcagattgaaaaccgtatcatcgaagcgaaaagccgtggcatctatgaagccccgggaatggcgctgctgcatattgcttacgagcgtctgctgactggtattcacaacgaagacaccattgagcagtatcactctcatggccgtcagctgggcaaactgctgtatcagggccgctggttcgatccgcaggcgctgatgctgcgtgatgcgctgcagcgttgggtggcgagtgcaattaccggtgaagtgaccctggaactgcgtcgcggtaacgactactccatcctgaacaccgtgtctgataacctgacctataaagcagagcgtctgaccatggagaaaggtgagtcagtgttttcaccggacgatcgtattggccagctgaccatgcgtaacctggacatcaccgatacccgtgagaagctgttcaactatgttgagaatggcctgctctctgcgaattcaggtaacggcctgccgcaggttgaaaacctggaacacagcgataagaaataatcgctgatatagcatgcaaaaggcgtcctggggacgccttttttatttggactttcgtagggcgggtaagcgcagcgccacccgccattttgcccggtaagcgctgcgcttacccgccctacgaaaacaacacataatctacagacgaaaaaaaagacgtctttcgacgtctttcttctggaatattggtaccgaggatgggactcgaacccacaagcccgttagggcactaccacctcaaggtagcgtgtctaccaattccaccacctcggtacggaatacttactgcgggatatcgctggttggcttagccggtgcagctggctgagtctgctcagtttttgctggcgcgctcaggttttcccactcgcttcctttgctggtcttgttgctgttgatattgccaagcaccagactgatgatgaagaacagcgtcgccagaatcgccgtcgtgcgggtcatgaagttcgcagaaccacttgaaccgaacagcgtaccggaagcgcctgctccgaaggaggctcccatatcagcgcctttaccttgctgcagcataatcagcgctacgagagcgatggctacaataaggaaaacaactaaaagagcttcgtacataatcaacctgttccttgcggatttgccgcataccaatgcttcgaccaattagcaggatttctgtttcccactgaagcgggtgtgaatactaaccaaagcgaatcaccttcgcaagggcattttcgacgcattgtatcaactgcggaaaaaaacagcaaaaagccattaattgcttaaaacaaaggcggcaaacgccgcctttttaaacatttagcgtgcaagattatgcagctttaacagcatccgcaatacggtgcgcaaattcggttacctgcgcttcgtcttcgccttccaccatcacgcggatcagcggttcagtaccagacttacgcagcagcacgcgaccacggctgcccagggcagcttcaacgtcagccatcaccgctttcacgttctcattttccagcggatcgcctttgccggcagtgaaacgtacgtttacgaggatctgtgggaacattttcatgccgctgcacagatcgtgcaggctcatatggttgcgcgccatggcggcaaccacctgcaacgcggccacaataccgtcaccggtggtggttttgtcgagcaggatcacgtgacctgaattctcagcgccgatacgccagcccttctcctgcaatttttccaacacatagcggtcacccactttcgcgcgaacgaacggaataccgagctgtttcagcgccagttccaggcccatgttactcatcagcgtcccgaccgcaccgccgcgcagctgaccctgacgcagaccttcacgcgcaataatgtagaggatctggtcgccgtcgaccttgttaccttcgtgatcaaccatgatcacgcggtcaccgtcgccgtccagcgcaatacccagatcggctttttctgccagcacgcgcgcctgcagggcacgaacgtccgtcgcaccgacctgctcattgatgttcagaccatccggctcacagccgatggcgattactttcgcacccagttcgcggaagacattcggggcgatgtgataggtcgcgccatttgcacagtccaccacaattttgaggtgggccaggctcagctcattcgggaaggtgcctttacagaattcgatatagcgacccgccgcatcaacgatacggttcgctttacccagctcggcggaatcaacacaggtgatctctttttccatttcagcttcaatggcttcttccacctcatccggcagcttggtgccatcaatagagaagaacttaatgccgttgtcgtagaacgggttgtgagaggccgagataacaatccccgcttccgcacggaaggtgcgcgtcagatacgcgaccgcaggcgttggcattgggcctgtaaaagaggcggacagtccagccgccgccagccccgcttccagcgcggattccagcatatagccggaaatacgggtgtctttaccgatgataattttacgtgagccatgacgcgccagaaccttgccggcagcccagccgagcttcaggacaaaatcaggggtgatgggagcatcgcctacgcgcccgcggataccgtcggtaccaaaatatttacgattactcatagcgtttgttttccttcgctgccagtgtggcttccaccacacgcatggcttctactgtttctttgacgtcatggacacgaataatgtgcgccccctgcatcgccgcaatcaccgcgcaggccaggctgccgctcaggcgttcgctcgggcctacattcagcaactggccaatcatcgactttctcgacatccccaccagcagcggcaggccaaagtgatggaattccgataagcgcgcaagcagcgcatagttgtgtgagagatttttaccgaaaccgaaccccgggtcgagcagcaatttctcttttgggataccggcacgttcacaacgttcgatatgctcaataaagaagcgatttacgtcggcaaagacatcgtcatacttcggcgcgtcctgcatggttttcggttgcccctgcatatgcatcaggcaaaccggcagcccggtttccgcagccgcctcaatcgcccccggctcggtaagtgaacgaatatcattgataatgtgagcgcccactttcgccacttctcggatcacttccggtttggaggtatctacagagatccacacttcaaaccgctgcgcgattgcttcaacgaccggcaccacgcgcgccagctcttcttccacagacacgtccgccgcaccggggcgcgtcgattcgccgccaacatcaatgatggtggcacctgcattaatcattaaattcgcatgcttaaccgcctcgataagcgtgttatgcgtgccgccgtcagagaaggagtcaggggtaacattcaggatccccatcacatggggatgtgaaagatcgagatgcgagtcctgagcgaataatttcatggcgaaatccctgatatctaaatggttaaacagaaatgaaaaaccccggagcaagctccagggtttgaggtacaaacaaacgcttcaacagcagtgacttacttatcgcccaactgttctgacatggtgttgcccgggtttggcgtacgcggttcatcaaccggacgcggcgcacgcggggtgccattgttgtcagagttattggaagcgcctgggtcttcccagcctgctggcggacgcacttcgcggcgcgccatcaggtcgtcaatctgcggtgcatcgatggtctcatatttcatgagcgcatctttcatggaatgcagaatgtccatgttgtcattcaggatctgacgcgcgcgaccgtagttacgttcaatcagcgctttcacttcctggtcgatgatacgagccgtttcatcggacatatgtttcgctttcgcgacggagcggcccaggaacacctcaccctcttcctctgcatacagcagcggaccgagtttgtcggagaagccccactgagtcaccatgttacgtgccaggtttgtcgccactttaatgtcgttcgacgcaccggtagaaacatgttccggaccataaataatctcttccgccagacgaccgccgtacagggttgagatctggctttccagcttctgacggctggcgctgatcgcgtcgccttcaggcaggaagaaggtcacacccagcgcacgaccgcgcggaataatcgtcactttatgcaccggatcgtgttccggcaccagacgaccgataatcgcgtgaccggcttcgtggtaagccgtggactctttctgcgcttccgtcatcaccatggagcgacgttccgcacccatcatgatcttgtctttcgctttctcgaactccaccatcgacacgacgcgcttgttaccgcgagcggcaaacagtgcagcttcgttgaccaggttagcgagatccgcaccggagaagcccggagtaccgcgcgcaatgattgccgcgtcgatatctggtgccagcggtacgcgacgcatgtgaactttcagaatttgttcacgaccgcgaacatccggcagaccgacaacaacctgacggtcgaaacggcctggacgcagcagcgccgggtcaagaacgtccggacggttagtcgccgcgataacgatgataccttcgttaccttcgaagccgtccatctcaaccagcatctggttcagcgtctgttcacgttcatcgtgaccaccgcccagacctgcgccacgctggcggcctacggcgtcgatttcatcgatgaagataatgcacggtgctgccttcttggcctgctcgaacatgtcacgcacacgagatgcaccaacacccacgaacatttcaacgaagtcagaaccagaaatagtaaagaacggcaccttcgcttcacccgcgatggctttcgccagcagggttttaccggtacccggagggccaaccatcagcacgcctttcgggatcttaccgcccagcttctggaaacggctcggctcgcgcaggtattcaaccagttcacccacctcttcttttgcttcgtcacacccggcgacgtctgcaaacgtggttttgatctgatcttccgtcaacatacgcgccttactcttaccgaacgacatggcacctttgccaccgccgccctgcatctggcgcataaagaagatccagacgccgataagaagcagcatcgggaaccaggaaatgaagatagaagccaacaggcttggttcttctggcggctcgcctaccactttgacgtttttagtcagaaggttatcaagcagcttaggatcgttcaccgggatgtaagtcgtgtaacggttactatctttcttggtaacgttgatctcacgtccgttgatacgcgcttcgcgaacctggtcctgattgacctcctgcaggaaggtagaataatccaccttgcggccattcgactcgctgggcccaaagctctggaatactgacatcagcacaacggcaatgaccagccagagtattaggtttttcgccatgtcactcaagggattaacctcatattacaactgtgttaaaaacagcgtcaggatactctatatccagtttcattcaaactttcgtctgaaatctcccggttatcattttcgcccggtcgctacaatatacacttcacgggaacgggcccgggaagagtccggcttacgaactttgaccttcgcaaacagggagcgaatttccttaagatactcctcgaaaccttcgccctgaaacaccttcacaacaaaactaccaccaggcgctagtacatcacgacacatttctaacgctagctccaccagatacatggcgcgggggatatccaccgccggtgttccgcacatatttggtgccatatctgacatgacaacctggaccttactgtcacctacacgatcaagtaacgctttcagcactaattcatcacgaaagtcgccctgaaggaagtcgacaccgacgatggggtccattggtaaaagatcgcacgcgatgattcggcctgttccgccgatctgcgttaccgcatactgggaccatccgccaggtgccgcaccgaggtcaacaaccgtcatccccggcttaaaaagtttgtcactttgctgtatttcatcaagtttaaaccaggcacgggaacgcaacccctttttctgtgcctgttgaacatatttatcgctaaagtgttcctgaagccagcggctggagctggcagaacgctttttacctgtcatttaacatttccgtcctggttcatcgttacttgcctgtgacgtaaatttctacgcagctatttggcgatattagggagatggcggtagaatgaaccgttttcaatcccaacgtaagcaaaaatatacgatgaatctgagtactaaacaaaaacagcaccttaaaggtctggcacatccgctcaagcctgtagtgatgcttggcaacaatggtttgaccgaaggggtgcttgccgagattgaacaagcgctggaacaccacgagctgatcaaggtgaaaatcgcctctgaagacagagacactaaaaacctgatcgtggaagccatcgtgcgcgaaaccggcgcctgtaatgtacaggtcatcggtaaaacgctggtgctctaccgcccatctaaagagcgtaaaatctcgctgccacgttaaggatatcctgaattaaacacattttctgtgtgaaacgagggatttctgtcagcaggcgagcaaaatgccatgctccttgagttgataaaaggccgctacgcggcctttttcttttctttacaatgtatcaacatcttagtagagaagcgaattacaggtattcaaccttaataatttcgtattccacttcaccaccaggggtgcggatggtgacaacatcgtcctgctctttgccaatcaggccgcgagcaatcggtgagttcaccgaaatcaggttctgtttgaagtcagcttcatcatcacccacgatgcgataggtctgctcttcgtcgttgtccaggttcagcacggtaacggttgaaccaaaaatcacacggccattattcggcattttggtgatatcgataacctgtgcattggacagttttgcttcgatatctttaatacgcccttcacagaagccctgctgctcacgcgcggcgtggtattcagcgttctctttcaggtcgccatgctcacgcgcttccgcgatagcggcgatgatttcagggcgacgtacggatttcagaaaatccagctcttcgcgcagtttttcggcaccacgtaaggtcatcggaatagcttgcatttgttatacctcttaaacattcctgttgggagcagtgttccctgctccagcccacctgaacaggccagaagcaaaaagaaaaccgacccgggagcaacgccccaggtcagcagcaatttttcaatttgatacgcattttaccgcgaagttcactatgggtcatcgtttactttgcagtgccatgcaccgtagtatgacggtttgttttcgggttgttagcgcgagattatgcgattttccagttttatcatcggattgactaccagtataacgttcaccgcccaggccgcgaatgttgatgagtacattaatcagcttcccgcaggcgcgaacctcgccctgatggtgcagaaggttggcgcacaggctcccgagattgactatcacagtcaacagatggcgctgcctgccagtacccaaaaggtgatcaccgccctcgccgctctgctccagctcgggcctgacttccgttttacgaccacccttgaaaccaaaggtaacgttgagggtggcgaactgaaaggcgatcttatcgcccgttttggaggcgatccaacctttaaacgccaggatatccgcaatatggtcgcggtactgaaaaaaaccggcgtgcagaaaattgacggcaatgtactgatcgacacgtccatctttgccagccacgacaaagccccgggctggccgtggaacgacatgacgcagtgctttagcgccccgcccgccgccgcgattgttgaccgcaactgcttctcggtttcgctttacagtgcgccaaagccggatgatttagcatttatccgtatcgcgtcctactacccggtcaccatgtttagccaggttcgcacgctggccaagggttcccccgatgcccagtattgcgaactggatgtggtgccaggcgaccttaaccgcttcacgctcaccggctgcctgacgcagcgcgccgatccgctgccgctggcctttgcgatacaggatggcgcaagctatgcaggcgccattctgaaagatgagctgaaacaagcgggaataacctattccggcaccctgcttcgtcagacgcaggtcaaccagcccggcacggtcatcgccagcaaacagtctgcgccgctgcacgatttactgcgaattatgctgaaaaagtcggacaatatgattgccgatacggtgttccgcatgattggccacgcccgtttcggcgtgccgggaacctggcgcgcgggctcagacgcggtgcgtcagattctgcgccagcaggcggggatcgatctgggtaataccatcgccgtcgatggctccggcctgtcgcgccataatttgatctctccggccacgatgatgcaggtgcttcagtacattgcacagcatgacactgagctaaactttatttcaatgctgccgctggccggacatgacggttcactgcagtaccgtgcggggcttcacgctgccggcgtggatggcaaagtctccgcgaaaacaggctcactgcagggggtttacaaccttgcaggcttcatcactaccgccagcggacagcgcatggcattcgtgcagtatctttccggctatgccgtcgaaccgaccgatcagcgcaatcgtcgtattccgctggttcgcttcgaaagcaggctttataaggacatctaccagaataactagcgatgaaactacttatagttgaagacgatctgttattgcaggaagggctggcgctggggctggccaatgaagggtatgctctcgactgtgcaggcaccgcagcagaggcggatgccctgatccagagcggcgaatacagcctggtgatcctcgatttgggcttgccggataaagacggcaccacgctgctcagccagtggcgacgtcgcggcatcaacaatcccgtcctgatcctgacggcacgtgatgccattgaagatcgtatcaccgccctcgatgcaggcgcagatgattatctggtgaagcctttcgcgctcgcggagctgcaggcacgggtgcgagcgttgattcgccgttatcagggccatagtgataacttactgatcgacggcgacattacgctgaatttgcaaacccagcaggtgctgcaacaggatcaggccgtagaggtcacgccaaaagagttcgccttgcttacgcgtctgatcatgcgcagcgggcaaacggtacacagagaaacgctccagcaggatatctactcctggcaggacgatcccgggtcaaatacccttgaggtccacatccataatctgcggcgtaagctcggtaaagacaggatcaaaaccgttcgcggcgtcggctatcgtctggagagccagaaatgaacagcatgcgtcggcgtctgatggtactgctggcggtcattctcctgttttttcagctgataagcgtcatctggctatggcatgaaagccgtgaacagattggttttctggtcaacgaaacgctgtcagcgaaagcgcgcaataatcacgttgagaaagagatacgcgaagcgattgcctcgctgctggtcccttccctggtgatggttggctttaccctgctcttctctttctgggcggtcacctggataacccggccgctgaataaactccgcgccagcctcgctaaccgttcagccgataacttaacaccgcttcccatgttttccgacattgaagaaattggcgcggtgacgacctctctgaaccagctgctggcccggctggatagcaccattaagcaggaacgtctcttcactgcagacgctgctcacgagctgagaacgcctcttgctggcatccggctccatctggagctgatgtcgcagtcaggtgcgccacaggccgccacgctgattagccgtatcgatcagctcatgcataccgtcgaacagctgctgatgctggcccgggccggacaggccatggcgagcggacactacgaaaccgtgaactggacggaaaatatcattgaacctctcggcctggggcatgaagccaaagagcatacggtgatttggcccgctaaaagcgcgctcacggttcagggagacgccgttctcctgcgcctcatgctgcgcaacctgctggagaatgccgggcgctacagcccgtcagggacaacgattacagtgacattaaccgaggtcgatggcgggacgcagattagcgttatcgatcagggtcctggaattgatgaagcgcaccgacagtcaattaccgagccattccgccgtcttgaccagcgctacggaggcagtgggctgggcctgagcatcgtgcagcgcatcctccagctccaccacggcaggctaacgcttgagaatggcgctgaaggtggcttaatcgccagctgctggctgcccgcaacgctggaataaaaaaagcccccataacgggggctttgaacagcgattagtgcttgtagatgaactcgacgccttcttcgtcgtcttcatcccagtcatcatcccagtcttcatcgtcttcttccgcttccagctcttcgagctgctggcggtggtagtcatcccacatgaattcgactttttcaggctgtttgacttcttccgcctgaacaattgggttctcaatgatgaaggtcatcacatcccagcacagatctttcacgccaacctggcttgccgcagagatcaggtagtatttatcttcccaacccatcgcttcagcaatggctttcgcttttgcttccgcttcggctttgtccatcaggtcgatcttgttgaagaccagccagcgtggtttgttcgccagtttctcgctgtatttctccagctcgccaacgatgatgcgggcgttttcaaccggatcggaaccgtcgataggatcgatatcaatgaggtgcagcagcacgcggcagcgctcaaggtgtttcaggaagcgaatacccagacccgccccttccgcggcgccttcaatcaggcccggaatatcggcgaccacgaagctcttctcgttatccatacggacaacgcccaggcttggtaccagcgtggtaaacggatagtcagccacttttggcttcgccgcagaaaccgcgcgaataaacgtcgatttacctgcgtttggcatacccagcatgcccacgtcagccagaagcatcagttccagctgcaggtcgcgcttatcgcccggcgtacccatcgttttctgacgcggcgtacggttaacggaagatttgaaacggctgttacccagaccgtgccagccgcctttcgccaccatcaggcgctgaccgtgtttggtcatgtcgcccatggtttcacccgtcccctggtcaatcacacgcgtaccgaccggaactttaatggtgacgtctttaccgcgtttcccggtacagtcacggctctggccgttctggccacgttcagcgcggaaggatttttcgaaacggtagtcgatcagcgtgttgaggttctcatccgcctccagccacacgtcaccaccatccccaccgtcgccgccatcaggaccgccacgagggatatacttttcacggcggaagctcacgcaaccgttgccgccatcaccagccacgaccaggatcgtcgcttcatcaacaaacttcattttactctccgtaactcattcgcctgagcgggggactactacaaccgcttcatttttgtgccaacgtccccaaagacgatgaccaatggcggaatacatcgcgcccgcaaccacgacaaacgcaccgagataacccaacaggttgagcatcggtctgacgaagacatcgggccaggccattgataacaaatctgaaaataacagcgtaaacagcggggtaagcgtgatcaacgcgctcacctgtgctgcctgccagcgcgccatcgcttcggccagcgcgccataaccgaccagcgtgttcagcccacaaaaaatgaggcacgccagttgccagtcgctaagctgggtaatcacgcccggcttcgctaatggcagcaatgctattgtacacaaagtgtacagcaaaaagaggatctgctgtgaggcaagccgacgcaataacaccttttgcgcgacgccatagctcacccagaccgttgctgcccccacgccgaaaatgacaccccatgtataatccgtcaggcgggtaaaaatctcgatcagactggtgttgaagaacatcaccagaccgcacaacagcatgctcgccccgataatctgcgtaccgcgcatcttctccttgaggataaagacgctggcgaccatcatgcccaccggcgaaagctgaccaatcacctgcgacgccgtggggctgagatattgcagggaagagctgaacaggatgaagttaccgaacagaccgcccgtcgcgatagccagcaataccagccagcgcggtttacggaagagccgcaagggtggaagcttacctttgacggccagaatcgccccgaggccgatgcttgccatcagaaagcgataaaagaccaccgtaggcggctccatcacttccagtacctgcttcattgcaattggcagcgcaccccagcacattgcggttgtgagcgccaaaagaattcctatgccggcctgctgcttcatgcccgttttccctacagaaaaaattaccgggtttccaatgtaaaaagccccgcaacaggttgcggggctttaatccgttaccggaccgagaaaaccttactcagcaacgatgctgatgtatttacggttgttcgggcctttaacttcaaatttcactttaccgtctgctttagcaaacagagtgtggtcacgaccgcaacctacgttgttgccagcgtggaatttggtaccacgttgacgaacgatgatgctacccgccagaacggattcgccaccgaaacgcttaacgcccaggcgtttagcttctgaatcgcgaccgttacgtgtggagccgccagcctttttatgtgccatttaaatctctcctcaggtcttaggcgctgatgccagtaattttcacatcagtgaaccactgacggtggccctgctgcttacggtagtgcttacgacgacgaaacttaacgattttaactttctcgccacgaccgtgtgcaacaacttcagctttgataacgccgccatcaacgaaaggaacgccgattttgacttcttcaccgtttgcgatcatcagaacttctgcgaactcaacagattcgccagttgcgatgtccagcttttccaggcgaacggtctgaccttcgcttactcggtgttgtttaccaccactttggaaaaccgcgtacatataaactccgcttccgcgcacgtcctcgtatgaatcagagtgcgctataaatattcacaatagggcgcgaatattacgcaaaacgcgagcctttgacaagtgctaccgtcaatacatgaagaaaaaaaacacaacacgtacggtaacgtttatctgagccgttttttcagtacaatcagcactactattgataaaccgaaacccttcgttaccccattgaagatgggatcaacaggataaaaagcccggcttttgcgatgaatttagaaaaaatcaacgagttaaccgcgcaagatatggcgggtgtgaatgcagcaatcctggagcaactcaactctgacgttcagctgatcaatcagttgggctattacattgtcagcggcggcggtaaacgcattcgtccgatgattgctattctggctgccagagccgttggctatcagggaaatgcccacatcactatcgccgcgctcatcgaatttatccacacggcgacgcttctgcacgacgatgtggtggatgaatcggatatgcgtcgtggcaaagccacggctaacgccgcgttcgggaacgcagccagcgtcctggtgggggattttatctatacccgcgccttccagatgatgaccagcctgggttccctgaaagtgctggaagtgatgtccgaagccgttaacgtcatcgctgaaggcgaagtgctgcagctgatgaacgtcaacgacccggacattactgaagaaaactacatgcgcgtcatctacagcaaaaccgcgcgcctgtttgaagcggcggcccagtgttccggcattttggcgggctgtaccgaagcgcaggaaaaaggcctgcaggactatggccgctatctgggcacagccttccagctgattgacgatctgctggactacagtgcggacggcgagacgctcggcaaaaacgttggcgatgacctgaacgaaggcaaaccgaccctgccgctgctccacgccatgcgtaacggaacggccgaccaggcgaagatgatccgtgaagcgattgagcagggaaatggccgccatcttctggaacctgtactggaaaccatggcaatctgcggatcgctggaatggacgcgtcagcgtgcagaagaagaagccgacaaggccatcgaggcccttcaggtcattccagacagcccatggcgcgaagcactgattggccttgcccacatcgccgttcagcgcgaccgttaatctccctttttctccccgcgaacctggcggggagattccagtacacaccagtaaattccgcgttcatgtaaattcatcggtttagagaccgcatgaataaagccatgtcttattctgaatattccttcaagtaacgcgaactttttagaacaagagttcgaaatgggtatagtaaacccgtcgtttcagaagaaacggcgtaggtgaatccgaacttaaggacggcgttatggatacgaaatttatcgactggcacacggctgatattattgccgcactgcgcaaaaaaggcacttcactggcagcagagtcccgccgccatggactgagttcttcaactctggcaaacgctctcacccgcccttggccaaaaggagaattaattatcgcaacggcgctggacacgcatccgtgggtgatttggccttcgcgctaccacgatcctgtcacccatgaatttatcgacagatcgcgcatgattcgccagagaaaagtaaaaaaagaatcgcaggaataaggtttttttgacaggaacagcacccccccggtcatttctggcagggggctgccggaacgattactcgcccttcacacgctcgatattggcacccagcgcgcgcagtttatcttcgatacgctcatagccacgatcgatgtgataaatacgatccacgatcgttgtgccttccgcgatacaacccgccaacaccaggctggcagacgcacgcagatcggttgccatcacctgagcaccggacagtttctcaacgccgtggcaaatcacggtattactttcgatctcggcacgtgcccccatacggatcagctccggtacgtgcataaagcggttctcgaaaatggtttccgtgataaagccggtcccttcggcgaccaggttcaacaaggtgaactgtgcctgcatgtcagttgggaaggccggatgcggtgccgtacgcacattgaccgcttttggacgctgtccatgcatatcaaggctgatccagtcttcaccgatttcgatatccgcgcccgcatcgcgcagtttcgccagcactgcatccagggtatctggctgcgcgttgcgacaaacaattttcccgccagagatcgcagcagcgatcaggaaggtaccggtttcgatacggtccggcagtacgcgatagacacccccgcccagacgctcaacgccttcgatggtgatgcggtcggtaccctgaccggagatcttcgcacccagcgccacgaggaagttggcagtatccacaatctccggttcacgcgcggcgttttcgatgatcgtggtcccttctgccagcgttgccgcagacataatggtcatcgttgcgcccacgctcactttgtccataacaatgtgcgcgcctttcagacgaccattgacggacgctttaacgtagccttcttccagcttgatctctgcgcccagtttttccaggccaaagatgtgcaggtcaaccggacgcgcaccgatagcgcaaccacccggcagcgagacctgaccctgaccgaaacgcgccaccagcgggccaagcgcccagatggaagcacgcatggttttcaccagatcgtaaggggcagagaagttattcaccttgctggcgtcgatccagacggaaccgttacgctcgactttcgtgcccaactgggtgagcagcttcatggtggtgtcgatatctttcagcttcggtacgttctgaatctctactggctcttccgcaagcagcgcagcaaagaggatgggcagcgcggcgtttttcgcgccagaaattgtgacttcgccctggagacgcgttggcccctgtacacgaaatttatccatggtgtgctctcttataaattcaaccgtgctgcgggcctgtcgccctcagctcaaaaaccgtttagtttgcgatcgcgtgcccactcttgcggggtgaacgctttaatcgacagggcgtggatgcggttatccgcaatatattccatcagcggcgcgtatacagcctgctgtttcttcacacggctcataccgtcgaacatctcacccacagcaataacctggaagtgactgccatcgcttgtgacgtgggcttcctgaagggagagtgcattcatcagcactgtctggatttcatgattttccatgggctcttaatcatctgatagtgaaaacaagcccaacatcttagagcaaagtggcgtcgtcttaaacaagcaaaaagccccgacgatgaaactgtcagggctttcggaagtaacgcactgaaaatattaacgaggcagtacgtcctgaggcagattgtagagctgcgccagggtcacgacattctcgctcgcgccgcgaagcgtgacgctcgccccctgctttttccctaccgcaaccagatgggcaagcagtgcaacgcctgccgtatctacccgcgtgacgttggttaagtcaataaccgtcacgccctgcatggcctcatggcgtttatcccataaggggttcagcagatcctgatccagctcaccggacagctttaatgtctcgccttcacgcgaccagctgagttgctgtgacattacttcttctcgtccagactaattttctgacgagcgatggactgcagctgcgcggtcaggccatcaatccccttggtgcgcagcaggtcgctccactcgttctgtttggtggtgatcatgcttacgccttcggcgatcatgtcatacgcctgccagtggccggtctggctgtttttacgccactggaaatccagacgcaccggcggacggccgttaggatcgttgatcgttacgcgaatagggacgatggtcgcatcacccagcggctgctccggggcgatctgataggtctgaccgtggtacatcgccagcgcctgaccatacgcctgcttcaggtattcacggaaagcggcaaaataggcctcacgctgcgccggggttgcgtctttgtaatagcggcccagcaccagggctcccgcatatttgatctgcacgtacggcagcagctcctggtcaaccacgtcacgcaggtaatcaggattagcacgaatcttaggctgctcgtttttaagacgatcgaaggttttcttcgcggcttcgtccatcagtttgtacgggttactctgatccgccgcgtgcaccgcggtgagaggggcaataaccagcatggcaaccattaacagtcgtttaaacatgaatgacttctcctgatattaattcgcagcacctggggtcggcgcagcattggtatggtcttcactctgcgcaggggcattgtcagactttttatcatcccctttactgttgtaaaggaactgaccaatcatatcttccagcaccatggcggacttggtgtcctggatcacgctcccgtccttaaggatagtcgttcccagctcggggtcttcaaaaccgacgttaagcgccagatattgttcgcccagcagaccggaagtgcggatagaaagggagctggtgtccggaatgtggttgtaacgctcttcgatatccatcgcgacacgtggcagataggtcttctcatccagcgtaatgtcagatacgcgtccgatcaccacgccgccaatacggaccggtgaacgcgccttcagcccgccgatgttatcgaaggtggcatagatgcgatacgtcggctcggtgcgcacagacgtgatatccgccgctctcaggcagataaacagcgcggccagcagcgccagcagcaggaatacaccgacccaaatttcattttttctcgtttgcatgaactcaattcccaaacatcagtgcggtgagcacaaaatccagacccagtacggccagcgacgaatgaacgacagtacgtgtagttgcgcggctaatgcccgccgacgtcgggatggcatcgtaaccattgaacaatgcaatccaggtgaccgtaatggcaaataccacgctcttaatcaggcagttaatcagatccattcgcagatcaatggcgtcctgcatggcagaccagaagaaaccggcatcaatgcctttccagtgcacgccaaccagcgaaccgccccagatccctacggcgacaaacagaatcgtcagcagcggtaaagagatgaccccggcccagaaacgcggcgagatcacgcgacgcagcggatcgaccgccatcatttccatgctggagagctgctcggtcgcgcgcatcaggccaatttcagccgttaaggccgaccccgcgcgcccggcgaaaagcagcgccgccacaacgggccccagttcacgcagcagcgagagcgccaccagcatcccgaggctggtttccgcactgtaggttgtcagcaccaggtagccctgcagacccagcaccataccgataaacagaccggagacaatgatgatgagcatcgacagcacgccgacgttataaagctgacgcaccaatagcggcgcgtgcttacggaattccggcttgccgaccagcgcgttgaataacatcaatccggcacgcccgaacgtcctgatggtttttatgccacggtgtccgagagcggccaacgcatttaacagcatgagtggcttaactccctattcccagtaaatcatcacgatagtcgcccgccgggtagcggaacggcacagggccatcggcaataccgtcaaggaactgccgcacgcgcggatcgcaattttcctgcagcgcctgggcgctaccgtgtgcgacgatctttttgtccgctacgatgtaggcgtaatcggcaatgctcaacacttcaggtacatcgtgagacaccacaatgcaggtgacgccaagcgcgctgttcagctcagagatgagcttcaccagcacgcccatcgtgatgggatcctgcccgacaaacggttcgtcgaacatgattaaatcaggttctaatgcaatggctcgcgccagcgcggcacgacgcgccatcccgccggacagttccgaaggcatcagcttcgcggcgccccgcagcccgacggcttctagcttcatcatcaccgtgcttttcagcagcgcaggcggcaggctggtatgctcgcgcagcggataggcaacgttatcaaagacgttcatgtcggtgaacaaagcccccgactgaaagagcatgctcatgcgtttgcgaacagtatacaggcgcgagcgcgacatctccgggatgttttcgccatcaaagaggatttcaccgctatccggtgggatctgcccaccaataaggcggagcagggtcgttttaccgatcccggacggccccatgatggcagtaattttgccacgcggcacggtcaacgaaatatcatcaaatatcaatctgttggcgcgagaaaaactcaccccgcggacatcgactaaattcgccatggtttggctcatttatggttcctttcttatcctgctcacgttaaggcatgtagcctgaatcagccctaaactccgcatttttacagaataataaccgtagaggttagcgaaagctggcatttgttttacttttccggcgcataaagtcaaaattaggaattcgttacgcctcagactgtatgcagtccagccattcccgagcaatggaccgacgagtatacctgaagaaaggacttttgatgcttttagcaacagcactgttaataattggtttactgttggtggtttacagtgctgaccgtttagtgtttgctgcatctatcctgtgtcgcctgagtggcgtaccgcctgttgtcatcgggatgaccgtggtcagcgtaggaacgtcgcttcctgaaatcatcgtctctgtctctgcctcgctgcatggtcaggtagacctggcagtcggcaccgccattggctctaacatcgtcaatattttattgattttaggcctggccgcgctgctccatccttttcgcgtgcattctgatgttctgcgccgtgaattgccgctaatgttactcgtaagcctgctggcagggtgcgtattttacgatggcgtactgagctacagcgacggcattttcctgctggcgctggccgttatttggctgctgtatagtgttaagatcgcccgtctggctgaaaagcagggtcaggatagcctcacgcgcgagcaggtcgccgagcttccgcgagaaggcacgctgcctgttgccctgctctggctgggcgtcgcactgatcatcatgccgatggcaacgcgcatggtcgtggataacgcgacggtgctggcgaactattttgccatcagcgagctgaccattggcctgacggtgattgccatcggcaccagcctgccggagctggccaccgccattgcgggggcacgtaaaggtgaggatgacattgccattggtaatatcatcggttctaacatttttaatatcgccattgtgatgggcctgccggccctgatttcgccagggccctttaatcctctggcgttctcacgtgattacggcgtgatgttgctggtcagcgtaatttttgccctgctctgctggcggcggcaacgacagatcggcaaaggcgcaggcgcgctgctgacgggtggatttatcgtatggatggcgatgctgtactggctctcgcctcttctctctgggtaaacggaaacgcattatgtcgcaaatagaattgcagccggtttttgactttcagaaagcaggcaaagacgttctggagattgaacgtgaaggtctggcgcagttagatcagtacattaatcaggattttagtctggcatgtgagaagatattctactgcgccggcaaagtcgtggtgatggggatgggcaagtccggccacattggacgcaaaatggcggcaacctttgccagtaccggcacctcttccttctttgtccacccgggggaagccgcgcacggggacctgggtatggtcacgccgcaggatatcgtcatcgcgctctccaactccggtgagtccaatgaaatcctggcgctcatcccggttctgaagcgactgcaggtgccgctgatttgcatgaccagccgtccggaaagcagcatggcgcgtgcagccgatattcacctgtgcgtgaaggttcccaaggaggcctgtccgctcggtctggcgccgacctccagcaccaccgctgcactggtcatgggcgatgcgcttgccgtggcgctgcttgaagcccgtggctttacgccggaagatttcgcgctttcccacccgggcggcgcgctggggcgcaagctcctgctgcgggtaaacgatattatgcacaccggggatgagatccctcacgtcagtaaagaagcctccctgcgtgatgcgctgctggaaatcacccgtaagaatctggggatgacggtcgtgtgcgacgatctgatgaaaattcaggggatcttcaccgatggcgacctgcgtcgcgtgttcgatatgggtgtcgatgtccgcacgctcggcattgccgacgtgatgacgccgggcggtattcgcgtgcgtccaggtacgctggccgtggatgtgctgaacctgatgcagtcccgccatatcacctccgttatggttgccgatggcgaccagttgctgggtgtggtacatatgcatgatctgctgcgcgcaggcgtagtgtaatgaaggataagacaatgagtaatgcgggtgcatcccttgcaacctgttatgggccggtcagtacgcagatgatggcaaaggcggaaaacattcgtctgctcatcctcgatgtggatggggtcctctccgacggcctgatttacatgggcaataatggtgaagagctgaaggcgtttaacgttcgcgacggctacggtatccgctgtgcgctcacctcggggattgaggtggcgatcatcaccggacgaagcgctaaactggtagaagaccgctgtgaaactttaggtattacccatctgtatcagggtcaatccgataagatggcggcgttcaatgatttactgggtaaactggctatcgcaccggaaaacgtggcctacgtcggggacgacctgattgactggccggtgatggctgaagttgggctgagcatcgccgttgccgatgcgcatccgctgctgatcccgcgcgccgactacgttacccacatcaacggtggccgcggcgctgtccgtgaagtctgcgatctgcttctgctggcgcagggcaagcttgatgaggccaaagggcaatcgatatgagtaaaaccagacgttggattatcattttgctttcgcttgtcgcactggtattgattggcgtgaaccttgccgatcgcgacgatacgcaaacggaagtgatcaacaataccgatccaacctataaaagcgatcacagcgacaccgtggtctacagcccggaaggcgcgctgaactatcgcctgattgcccagcatgttgaatatttttccgatgatggcgtttcatggtttacccaacctgtgatgaccacatttgataaagacaaagtgccgacgtggtcaattaagtcagatcgggccaaactgacaaatgaccgtatgctttatctgtatggccacgttgaagtcaacgccctgaccgctgactcgcaactgcgaaaaattacgacggataatgcccagatcaacctggtaacccaggacgtgacgtcgcaggatctggtcacactgtatggcacaacatttaattccagcggtttaagaatgcgcgggaacttacgcagcaagaacgccgagctgatagaaaaggttagaacctcctatgaaattcaaaacaaacaaactcagccttaaagtaattatcgccagcgcgatgctggcagccagtctccccgcgcttgctgtaacgggcgataccgaccagccgatccatattgagtccgacacccagtctctcgatatgcagggtaacgtcgtcaccttcacgggtaacgtcgtcatgacccagggcaccatcaaaatcaacgccgacaaagtggtcgtgacccgtccgggtggcgagcagggcaaagagattatcgatggctatggtaatccggcgaccttctaccagatgcaggacaacggcaagccggtgaaaggccgcgctacgcacatgcactatgagctggcgaaggatctggtcatcctgaccgggaatgcgtatctggaacagctggacagcaacattaccggcgaccagattacctatctggttaaagagcaaaaaatgcaggcctccagcgagaaaggcaaacgcgtgaccaccgtactggttccgtcgcagctgcaggacaaaggcaagggccaggccccggcacagaagaagagtaactaattcgttatggcaacattaactgcaaaaaacctcgcgaaggcctataagggccgccgtgtcgtagaagatgtcagtctgaccgtcaactccggcgaaatcgtggggctgcttggcccgaacggtgcgggtaaaacgaccaccttctacatggtggtgggtattgtgccgcgcgatgccggcaacattatcattgacgatgaagacatcagtcttctgccgctgcacgcgcgcgcgcgtcgcgggatcggctatctgccgcaggaagcctccattttccgtcgtctcagcgtttacgacaacctgatggcggtcctgcaaattcgtaacgacctgaccaacgaacagcgtcaggatcgtgctaacgagctgatggaagagttccacattgagcatctgcgcgacagcctcggtcaggcactctccgggggcgaacgccgtcgcgttgagattgcgcgcgcgctggccgcaaacccgaaatttatccttctggatgaaccgtttgcgggcgttgaccccatctccgttatcgacattaaacgtatcattgagcacctgcgcgacagcgggcttggcgtactgatcaccgaccacaacgtgcgtgaaacgctggccgtgtgtgaacgtgcctatattgtcagccagggcaatctgatcgcccacggtacgccgcagcagatcctcgaagatgatcatgttaagcgcgtctatcttggggaagacttcagactctgatagggtagaggtaacgtaacgccgaaccggagaaaaatgctctgaacatgaagcaaggtttgcaattaaggctcagccaacaactggcgatgacgccgcagctacagcaggcaattcgcctgttgcaactgtccacgttagaacttcagcaggagctccagcaggcgctggacagtaaccccctgctggaacaaaccgatcttcatgacgaggtagatacccagcaatcgcaggatactgaagcgctcgataccgcggatgcactcgaacaaaaagagatgcccgacgagcttccgcttgatgccagctgggatgaaatctacaccgctggaaccccttccggtacgcgtgcagactaccaggacgatgagctaccggtctatcagggcgaaaccacccagtcgctgcaggattacctgatgtggcaggtggaactcacccccttctccgataccgaccgcgcgattgccacgtccattgtcgatgccgttgacgacaccggctatttgaccgtcaccctcgacgatatactggaaagcatgggcgacgacgagattgagcttgaggaagtcgaagccgttctgaagcgcatccagcgtttcgatccggtaggcgtggccgcaaaagatctgcgcgactgtctgctgatccagctttctcagttcagtaaagagacgccatggctcgaggaggcgcgcgcgatcatcagcgatcatctggatctgctggcgaaccacgatttccgcaccctgatgcgcgtcacgcgcctgaaagaagaggtgctgaaagaagcggtgaatctgatccagtcgctcgatccgcgccccggccagtcgatccagaccagcgagcccgagtacgtgatcccggatgtactggtcagaaaacacaacggccgctggatcgttgaactgaattcagacagcatccctcgcctgcaaatcaaccagcagtatgcctccatgtgcaccagcgtgcgtaacgacgccgacaatcaatatattcgtagcaatttgcaggaagcgcgatggctgatcaaaagtctggagagccgaaatgatacgctgctacgcgtcagccgctgcattgtcgaacagcagcaggcgttctttgagcagggcgaagagtatatgaaaccgatggtgctggcggatatcgctcaggccgtcgagatgcatgaatcaaccatttcccgtgtcaccacgcagaagtatctgcacagtccacgcggtatttttgagcttaagtatttcttctccagccatgtgaataccgagggcggcggcgaagcgtcgtcaacggccattcgtgctctggtgaagaagttgatcgccgcggagaatcccgcgaagccactaagcgacagtaagttaaccaccatgctgtccgatcagggtattatggtggcacgtcgtactgttgcgaagtatcgagagtctttatccattccgccgtccaaccagcgtaaacagctggtctgacacaaccgataaggaagacactatgcagctcaacatcactggacaaaacgtcgaaattactgaggctttacgcgactttgtgaacgcgaagtttgcaaaactcgagcagtatttcgaaaggatcaatcaggtctacattgtgttgaaagtggagaaagtgactcatatctcggatgccaccctgcatgttaacgggggggaactgcatgccagtgcggaagggcaagacatgtacgctgctatcgacggcttgattgataagcttgcgcgacagctcaataaacataaagataaactgaaacaacactaattgtccgggcagttaacgggtgcaggacggcctgttgtgaaacacaacaggccatttgtacagttagcgcttaggtgaaattatgatgaacaacgattccgctcttcaactgagcaatgtccttaaccaggaatgtacccgcagtgcggttcactgccagagcaaaaaacgtgcgctggaaatcatcagtgaactggccgcaaagcagctgggcctgccgccgcaggtggtgttcgaagcgattctgacccgcgaaaagatgggcagtaccggtatcggcaacggcatcgcaatcccgcacggcaagctggaagaggataccctgcgtgccgtcggtgtgtttgtgcagcttgaaacaccgatcgcctttgatgccattgataaccagcccgtcgatctcctcttcgcgctgctggtgcctgctgaccagacgaaaacccatctgcatacgctgtcgctggtcgccaaacgtctggctgataaaaccatttgccgtcgactgcgctcggctcaaagtgatgaagagctttatcaaattatcaccgaagcagaaggcaatcaggatgatgcataaccaggagatggccttcacatctgttgtcctgaggagaaacggaacatggtgctgatgattgtcagcggtcgttcagggtcggggaaatccgttgctctgcgcgcgctggaagacatgggtttttactgcgtcgataaccttccggtcgtgttgctgcccgacctggcccgtacgcttgcggagagacagacctcggccgccgtcagtatcgacgttcgtaacatgccggaatcgccagagatcttcgaacaggcaatgagtaacctgcctgacacgttctcgcctcagctgctgttcctcgatgcagaccgtaataccctgattcgccgctacagcgacacccgtcgtttgcacccgctttccagtaagaacctctccctggagagcgcaatcgatgaagagagcgatctgctggagccgctgcgttctcgcgccgacctgattgtcgacacctctgagatgtccgttcacgagctggcggaaatgctgcgtacccggttgttgggtaaacgcgagcgcgaactgacgatggtgttcgaatcctttggcttcaagcacggtatcccgattgatgcggattatgttttcgacgtgcgcttcctgccgaacccgcactgggatccgaaactgcgtcccatgaccggtctggataaacccgttgcggccttcctcgacaggcacacagaagttcacaattttatctaccagacgcgaagctaccttgagctatggttacctatgctggagacaaacaatcgtagctatctgacggtagcgattggctgtaccggcggtaaacatcgttcggtctacatcgccgaacagctggccgactacttccgctcacgcggaaagaacgttcagtcccgtcatcgcacgctggaaaaacgtaaaacatgaccgtaaaacagaccgttgagatcaccaataagctgggcatgcatgcgcgcccggcgatgaagctgtttgagctgatgcagggtttcgatgcagaagttctgctgcggaatgacgaaggtaccgaagcggaggcgaacagcgtgattgcgctgctgatgctggattccgccaaagggcgtcagattgaagtcgaagccactggcccccaggaagaggaagcgctggcggcggtgattgcgctgtttaacgctgggttcgacgaagattaaggtctctgcccttcaggcgggtggcgctgcgcttacccgccctacataagtttgttgctctccataaacccttctcctcccaactgacgcatctggcgcataatccacgcctgacggcttcgcacgtaccctgagggggcactggctttaaaacggatgggattaggtagaacagccgcgagcagcgccgcctcagacatgctcagcttgctggcgggtttattaaaatagcgttgtgatgcagcttcgacaccaaataccccgtcgccaaactcggcaacgttgagatacacggtcagaatgcgctttttgctccagaccgtttccatgcccagggtgagccccgcttccagcccctttcgcacccagctgcggccgtcccacagaaacagatttttggccgtctgctgcgacaacgttgacgcgccgcgcacgcggttttcatggtgttcgttatgggccagcgccttctcaatggccgcaacgtcgaacccccagtgctcagggaatttctgatcctccgctgcgatgaccgccagccccataaacggagagatctcgtccatgcttacccagtcagaatgggcaacatagccgaaatcgccgctgagccacgcgccgagctgacgctcaaccatcacggcagagaacgggaccggcataatgctgaacacggccagcccgcctccccagaacaccgccatgacgagaacaatgcgtagaagaaggcgtttcacccatgcgcctgcggaaaacggacgcctcattccgtcagcaccagcacgcgggcgaccagtttttcaatgcccacggcggcttccgcgatattcttcgccagcatatacgcaggcgtggtgacaatcttgttatcttcatcaaccacaatgtcatccaccgggcacggaacgtgttcgccccccatttcctcgacgatctctgcggtatcaatatccgtcccgatagtcaggcgcagcgggaaatcaaaaattttaggcaacatcgccggtgcgatacagataaagcccagcggtttccctgccgcatgcatggcctgcgacagcgctttgagatgaggatcgatctgacactccgcgccctgcgcggcaaaggtactgagatttttggctgcgccaaacccacctggcacaatgagcgcatcaagctctgcagggtctgcctgaataagaggatggatgacacctcgcgcaatgcgcgcggcttcaatcagcacgttacgggtttccgccattggctcaccggtcagatggttaatcacatccgcctgatttttgtccggtgcaaaacaaatcacctcggctccctgcttagccagggccagcagcgtgatgacggcttcatgtatctcagagccatcgtaaacaccgcatccgcttagcacgacaccaatctttttcatcatgacaatccttttctgcaacttgctgaagcacattaataattttgattaaaacgctatgcttcacacatttcactgattcatgtaacaaaccatttaagatttgctatcttatctgcgtgcggcctaaatttttcaggcagcgccctttcaaaaataacgtttaaaaacaggcgcagccacgatttccctggtgttggcgcagtattcgcgcgccccggttaatccggggtcatttttttctggcgtcaacccaggcttttagcaccgccacatcgttttgccattcctgtttcatctcttcaacccaatcacccacgttatcttcccatgcaggtaaatcaggcgactgaatctgttgccccaactgctgcagatggcgtaagccaaccgagccggcggcacctttgattttatgtccttcttccacgatccccttctggtcacgggccgtcaggttggattccagcacgctcagatagcccggcatcattttttcgaacaccgccagaccgtcggtaatcagtttcggccccaccagatcgatgtactgctccagcatcgcggtatcgagtatcgtttgggcttttgcgctatcaacagacgtcatggtgctctcctcttcatcatgggtatcccagaattttttgatcatagcggtcagagcaggcaccgccagcggcttgctgagtacatcgtccataccggcatcgagatactcttttttatctttcagcacgttcgccgtcagggcaaccagcggcggcagttcgtcggccgcgtactgacgcgtcaactcgcgcgagatatccagcccggtcatatccggtaattgaatatccagcagaacaagatcgtattcgcctggtttaaacatctccagcgcggctttgccggtcatcgcgacatccacgctgttacccagtttttccagtacagagcgcgccacaattacgttcagctcaatatcttccaccagcaggacgtgcagggcaggcagcggcatatcgtcattttcaaaggtatcctctacctcttccgccaccgcaggggcatggaccgtcagcgtgaaggttgaccctttgcccggctggctggcaacggtgatatcgccgcccatactcttcgccagacgtttagacaccgccaggccaatgcccgtaccggtggccggtttcccaccgttgctgtctttcacctgatagtacatggcgaagattttgtcctgctcctccagcggaatacccatcccggagtcttccacctcgaagtgcagcatgtcaccttcgtcatagcggatacgcaccgccacctttcctttctgggtaaatttcaccgcgttgctgatcaggttccacaggatctggcgcagtcgcgtgccgtccgtcaccactttatgcggcagcggcagggttggctccatgacaaagctcagtcccttctgctgcgcctgcagaccagagaggttttccagatcggcaaggaagctggtgaaatccacaggctggttatcaagctgaactttacggcgctccatcttatccatatcaataatatcgttgaaaatattacccagcgtgaccgctgaaacatggatagtcttgaggtatttttcctgctctgcggtcaggtcggtatccagcagaatacggctcaacccgacgatgccgttaagaggcgtacgcagctcgtggctgatggtggagataaaggtggtcttgtcgcggctggcgcgctccagggcatcctgatagcgcttacgctcggtaatatcgcggccaaagcccatcaggccgtggcgtttccccacgcggtcatagtagggcaccttacggatctcaaagcaggctttgcgcccgtccgggtaatccagccactgttcataggtcagcgagacgttatgacggaagactttttcgtcggtttccatgaccttggccgccgcctcttcagagtaaacgtcctgcggcttcaggtgtatcagctgcttctcgcttttcccggtgagcaactccatcgcccggttacagccggaaaactctttatcttcattacggtagaacaccagatccggcgacgcatccaggaacgatcgcaggaaagaggactgctgctcaagctggatctgcgtgacctcgcgctctttcatttcgattttcagctgctccagggtggcctgacgctcggcctccgctttctcacgatctgaaatctcctgattcagctgcgcaatgttgtctttgagctggacgttgagcttcaggtcgcgctctctcatctcttccagcttatccaccagcttagacaaacgctgacgggactcttccagctgttcaaccacgacggaaaggaaatagaccgcccagggagtaataagcaagccaaagaagatggagcggatgacgtcgatactctcgacctgaccatgcagaaccatggtaaccgccatttgcacgacaatggccagaacgaccagcgccagcgcaagcagcatggaaaaacgcaccagcccaagcttcatcatcaggtcgacgtaatactgggcaagcattcgaatttgcttcatagaggatcccttcacgacgttatcgctcaataatactcaaattcgcggcgggacgttgaaggttgtgagaaaaagtgcggggtgaaacaggagattagcctcgctcccgggtaaccggaagcgaggagaggtcaatcaggagcgtttcaacagcagccagagactgatcaggaggaagctggcgcttggcagcagcgcaccgataatcggcggaatgccataaaccagcgtcagcggaccgaagatctgatcgagcacgtagaacacaaagccgaagctgatgccggtcacgacgcggacccccatcggcacgctgcgcaacggaccgaagataaacgacagcgccatcagcatcattaccgccacggacatcggctggaagattttgctccacatgttgagctgatagcgtcccgcatcctgtccgctcgacttcaggtatttcacatagttgtgcaaaccgctgatggagagcgcgtcaggatccagcgccacgacgccgagcttatcgggcgtcaggttggttttccacgtaccggttaccgtctgagcacccgtaatctgtttcggatcggtcaggtcagattcatcaacctgggacaaccgccactgcttatgttcggcgtcaaacttcgccgaagaggcgtggcgaacggactgcagacggcgctggtcatcgaaagcgtagatgctcactccgcccagttcatcattccccttcacccgttcgatgtagacgaagtttttaccgtctttcgcccataaaccttgctgagtcgagagcagtgagccgccgtacatcgcctgagcacgatagttacgcgccatctgttcgccctgcggcgcgacccactcgccaatcgccatggtcaacagcaccagggggatggcggttttcattaccgacagcgcgacctgcatacgggtaaaacccgaagcctgcataacgaccagctcactgcgctgcgccagcatccccagccccagcagcgcccccagcagggccgccatcgggaagaagatctgcacatccttcggcacgctgagcagggtatacatccccgcgcccagcgcgtcatagctcccctgcccggcttttttcagctgatcgacaaatttgataatgccggagagggacaccagcatgaacaacgtcatcatgatggtggtaaaaatggttttaccgatatagcgatcaagaacgccaaacgcctgcattagatggctcctttacgcgagaatcgggcacgtatgcggcgcacaggcaccgtatcccacaggtttaaccccagcgccagtaagatgtacaggctgttaacgaaccatgtccagaccatagggtccagcttacccttcgcgccattggaacgaatcgaggtttgcagcaggaaatagatcaggtaaagcagcatcgctggcagcatagagagcacgcgtccctgacgcgggttcaccacgctcagcggaacgacaatcagcgccatcataaacacggtgaagacaagcgtaatacgccagtggaactcagcacgcgctcggttggtatcggtattccagagggtacgcatgtccatttgctcggtatccgttggatcgagcgccacggtctgatggccgataatggcctgatagttctggaaatccgtaatgcggaagtcacgcagcatcgcggtaccttcgaaacgggtgcctttgttcagcgtcacgacctgagaaccatctttgcgctgagcaagctgaccggagtcggcaaccaccacagaaggacgcgcgttacctttaggacgcagctgcgccaggaagacatcgttgaatttgctgccgtcaacgctctcaataaacagcacggagtttccgtcggttgcctgctggaactgtccctgggctaacgccgccatgccggggttggctttcgcttcggccagcacttcgtcctgatggcgagaagacagaggacccgcccacatcacattcaccgccgcaacgatacccgtgaacagcgccagtatcatggcggctttgaccagcaccgctttgctcaggccacaggcatgcatcaccgtgatttcactctcggtgtagagtttcccaagcgtcatgagcaggccaaggaaaagacttagcggcaggataagctgcgccatttccgggatccctaaaccaagcagggaaagcaccagatttgttggaatttcgccgtcaacggccgcaccgaggatcttaaccagcttctgacagaaaaaaatcagcagcaggatgaagaggatcgccagttggcttttgagcgtctcccgcaccagatatcttatgattatcactttaaatacgcccgtaaaaacccgtctctttgctggaaaatcgcttgtttcatggcttaaacgtcatttattctcttgagtcgtcgaaatcatcgctaagattaaaacatccggcggattcacgcttcaggactttttctgacgtgtcgaaaccgtagtaacgtaagattaacacgaagtcaccacaacagcggacatgagttacgaaaggtttcaattctatccgtagccgccgccgttgtctttaagattcaggagcgtagtgcatggagttcagtgtaaaaagcggtagcccggagaaacagcggagtgcctgcatcgttgtgggcgtctttgaaccacgccgactctccccgatcgccgaacaactcgataaaatcagtgacggctatattagcgccctgctgcgccgtggcgaactggaaggcaaacctgggcagacgctgttactgcaccatgttccgaacgtactgtcagagcgcattctgctgattggctgcggcaaagaacgcgagctggatgaacgtcagtacaagcaggtgattcagaaaaccatcaatacgctgaatgataccggttcaatggaagccgtctgcttcctgaccgagctgcacgttaaagggcgtaacacctactggaaagtgcgtcaggcagtcgaaacggcaaaagagagcctgtacagcttcgatcagctgaagaccaataaaagcgagccgcgtcgtccgctgcgtaaaatggtctttaacgtgccaacccgtcgcgagctgaccagcggcgagcgcgccattcagcacggtctggcgattgccgccggtattaaagcggcaaaagatctcggcaacatgccgccgaacatctgtaacgccgcttacctcgcctctcaggcgcgccagctggccgacgcctacagcaaaaacgtgattacccgcgtcatcggcgaacagcagatgaaagagctgggaatgcactcttacctggcggtcggtaacggctctcagaacgaatccctgatgtcggtcatcgagtacaagggcaacccggccgaagacgcgcgccctgtcgtgctggtcggtaaaggcctgaccttcgattccggcggtatctccatcaagcctgcggaaggcatggacgagatgaaatacgacatgtgcggcgcggcggcggtttacggcgtcatgcgcatggtcgcggagcttcagttgcccatcaacgtgatcggcgtcctggcgggctgcgaaaacatgcccggcggtcgcgcgtatcgcccgggtgacgtcctgaccaccatgtccggccagacggtagaagtgctgaacaccgacgccgaaggccgtctggtactttgtgacgtgctgacctacgttgagcgcttcgagccagaagcggtcattgacgtcgccacgctcaccggcgcctgtgtgattgcgctgggccaccacattaccggcctgatgtcgaaccataatccgctggcgcacgagctgattagcgcctcggagcaggccggtgaccgcgcatggcgtctgccgctgggtgacgaatatcaggagcagctggagtctaacttcgcggatatggcgaacatcggcggacgtcctggcggggcgatcaccgcgggctgcttcctggcgcgcttcacccgcaagtacaactgggcgcacctggatatcgcaggtaccgcatggcgctccggtaaggccaaaggcgcaaccggtcgtccggtagcgttgctgtcgcagttcctgctcaaccgtgcgggttttaacggcgacgaatgatataaaatgccgggtggcggcttcgccttacccggcctacaacgtcattcaaccgtaggccgggtaagcgtagcgccacccggctttgcatttgaatccaaaactaagaagccccatatatgaagaatgcaacgttctaccttctggacaacgacacccatcaggatggactcagcgccgtcgaacagctggtgtgtgaaattgccgcagaacgttggcgcgcaggcaaacgcgtgttgatagcctgtgaagatgagcagcaggcgattcgtctcgatgaagcgctgtgggcccgcccgccggagagctttgttccgcataacctgtcaggcgaagggccacgcggcggggcgccggtggaaattgcctggccgcaaaagcgcaacagcagcgcgcgcgacattctgattagcctgcggatagattttgcagattttgccaccgctttcacagaagtggtagactttgtcccttacgaagaatccttgaaacaactggcgcgcgaacgctataaagcgtaccgcctggctggttttaacctgaatacggcaacctggaaataatggaaaagacatataacccacgcgatatcgaacagccgctttacgagcactgggaacagcagggctatttcaagcctaacggcgacgaaagcaaagagtccttctgcatcatgatcccgccgccgaacgtcaccggcagtttgcatatgggtcatgctttccagcagaccatcatggacaccatgatccgctaccagcgcatgcagggcaaaaacaccctgtggcaggcggggactgaccacgcgggtatcgcgacccagatggtggttgagcgtaaaattgccgctgaagaagggaaaacccgccacgactacggtcgcgacgcgttcatcgacaaaatctggcagtggaaagcggaatctggcggcaccattacccgtcagatgcgccgtctcggcaactccgtggactgggagcgcgagcgcttcaccatggatgaaggcctttccaacgccgtgaaagaagtcttcgtccgcctgtacaaagaagacctgatttaccgcggcaagcgcctggttaactgggatccaaaactgcgcaccgcgatttccgatctggaagtggaaaaccgcgagtctaaaggctccatgtggcacatccgctatccgctggccgacggcgcaaaaaccgctgacggtaaagattacctggtggtcgcgactacccgtccggaaaccctgctgggcgataccggcgtggccgttaacccggaagatccgcgttataaagatctgattggcaaattcgtggtgctgccgctggtgaaccgccgcattccgatcgttggcgacgaacacgccgacatggaaaaaggcaccggctgcgtgaaaatcaccccggcgcacgacttcaacgactatgaagtgggtcgtcgtcacgccctgccgatgatcaacattctgaccttcgacggcgatatccgcgaaagcgcagaagtgtacgacaccaaaggcaacgaatccgacgtctattccagcgacatcccggccgagttccagaagctggaacgctttgccgcgcgtaaagccatcgtggctgctgttgacgcactcggcctgctggaagagatcaagcctcacgatctgaccgtgccgtacggcgaccgtggcggcgtggttatcgagccaatgctgaccgaccagtggtacgtgcgtgccgacgtgctggcgaaaccggctgttgaagcggttgagaacggcagcattcagttcgtgccgaagcagtacgaaaacatgtacttctcctggatgcgcgatattcaggactggtgtatctcccgtcagctgtggtggggtcaccgtatcccggcatggtacgacaacgaaggcaacgtgtacgttggccgcagcgaagatgaagtgcgccaggaaaacaacctgagcgctgacgttgccctgcgtcaggacgaagacgtgctggatacctggttctcctccgcgctgtggaccttctccaccctcggctggccagaaaacaccgacgcgctgcgtcagttccacccaaccagcgtgatggtgtccggcttcgacattatcttcttctggattgcccgcatgatcatgatgaccatgcacttcatcaaagacgaagacggcaagccgcaggttccgttccataccgtctacatgaccggtctgatccgcgacgacgaaggccagaagatgtccaaatccaagggtaacgtcattgacccgctggatatggttgacggtatttctctggaagagctgctggaaaaacgcaccggcaacatgatgcagcctcagctggcggagaaaatccgcaagcgcaccgagaagcagttcccgaacgggattgaggctcacggtaccgacgccctgcgcttcaccctggcagcgctggcctcgaccggccgtgacatcaactgggacatgaagcgtctggaaggttaccgtaacttctgtaacaagctgtggaacgccagccgcttcgtgctgatgaacaccgaagatcaggattgcggcttcaacggcggcgagatgaccctctccctggccgaccgctggatcctggcggaattcaaccagaccgtgaaagcgttccgcgacgcgctggacagctaccgcttcgatatcgcggcgggcattctgtatgaattcacctggaaccagttctgtgactggtatctggagctggcgaagccggtcatgaacggcggcactgaggcggaactgcgcggcacgcgcaacacgctgattaccgttctggaaggcctgctgcgcctggcgcatccggttattccattcatcaccgagaccatctggcagcgcgtgaaggtgattgcaggcatcaacgcagacaccatcatgctgcagccgttcccggcattcgatgcggctaaggttgatgaagcggcgtctgcggataccgagtggctgaagcaggcgatcgtggcggtacgtaacattcgtgctgaaatgaacatcgcgccgggcaaaccgctggagctgctgctgcgcggctgtagcgaagcggccgttcgtcgcgtcaccgagaacaacaccttcctgaaaaccatggcgcgtctggaaagcatcaccgtgctgcctgctgatgacaaaggtccggtttccgtgaccaaaatcatcgacggtgccgagctgctgatcccgatggcgggtctgatcgacaaagacgctgagctggctcgtctggcgaaagaagtggcgaaagtcgacgtggaaattggcaaaatcgaaagcaagctggcgaacgaaggctttgttgcccgcgcgccggaagcggtcatcgcgaaagagcgtgagcgtctggttgccttcgccgatgcgaagaccaagctgattgagcagcaggcggttatcgctgccctgtaatgcttttaccccttacgcttcagggcgtaaggggtaaccttcctgaaaactcctcgcttgcactccccattctgcggtgctattaacagcagttatgtgtcaatttttgtaatgagtaatgctatgagcgtgattacccccgtcgcgacgacgatgcgccggatcgctgagcaggataacccggctatcgccgccgttattcgcaccgtttctgccgaatatggactgacggctgacaagggctacacggttgccgacccgaatctggacgcgcttttccagctctacagccagcctggtcatgcctactgggtcatcgagcagaacggccaggtcgtgggcggcggcggcgtggcgcccctcagctgcagcgagccggatatctgcgaactgcagaaaatgtatttcctgccaacggcacgcggacaaggactggcaaaaaagctggcgctgatggcgctggatcacgcgcgcaagcagggttttacccgctgctaccttgaaacgaccgccttcctcaaagaggccatcggcctgtatgaacatctgggctttgagcatatcgatgcgccgctgggctgtaccggccacgttgattgcgaagtcagaatgctgaaaagcctgtaactttcgttcctgccctcttctgttaagcggctgtaaactgaatgctctacactctcagttcacaccacaacgggggaaacacgatgtcgaagataaaaagctacgccgcaccgcaggcgggtgcagaacttgagctgtacgagtacgatgcgggcgaactaaaagcagaagacgtcgaagtacaggttgattactgcgggatctgccactcggatctctcgatgatcgacaacgaatggggcttctccagctatccgctggttgccgggcacgaagttattggccgcgtcgtggcgctcggtagcgccgcgcaggacaaagggctgaaagtgggccagcgcgtgggcattggctggacggcacgcagctgtggtcactgcgatgcctgtatcagcggcaatcaaatcaactgcctcgaaggcgctgttcccaccattctcaacaaaggtggttttgccgataaactgcgcgccgactggcaatgggttatcccgctgccggacagcattgatatcgaatccgccggtccgctgctgtgtggcggcatcaccgtcttcaagccgctgctgatgcaccatatcaccgctaccagccgcgtcggcgtcatcggtatcggcggactggggcatattgccattaagctgctgcacgcgatgggctgtgaagtcacggcgttcagctcgaacccggcgaaagagaaagaagtgctggcaatgggggcggataaagtggtgaacagccgcgatccgcaggcgctgaacgcgctggcgggccagtttgacctgatcatcaacaccgtgaacgtcgatctcgactggcagccgtactttgaagcgctggcctacggcggtaacttccacaccgtgggtgcggtaatgaagccgctgccggttccggcgtttaccctgatcggcggggatcgcagcatctccggttctgcaaccggtacgccgtacgagctgcgcaaactgatgaaattcgccggacgcaccaaagtggcaccgaccaccgaactgtatccgatgtcaaaaatcaacgaagcgatccagcacgtgcgcgacggcaaagcccgctaccgcgtggtgctgaaagcagatttctgatgtgagtttgccgggtggcggcttcgccttacccggcctactttcactgctgcgccaatacgttaaatacttccgctaccgcgaccgctcccggatccatcaccccatccaggttctctttattgacatacgacgagcgtcccgcgccggctttcgccatttttgccgttgcttctgcgccctgctgcgcggcctgcgctgccgcctgaatattgcctttctgtaacgcctccagcgccggttgcagcgcatcgatcagcgtgcgatcgccaagatccgctccgccatactgcttcatctgcgcaagtccactgagcaaggcctccgggagcgtctgaccatcgtgaagcttttgcccggccgcggtgaagaatatcgacatcagcaccccgctcgacccgcccatcaccgtagccagccgctcgccaaccagcagcagcagcttaggtacgtcattaagcgggagcgtgttctcctccaggcgctgcgcaatatcccgcgccccttgcgcaaaggtggagccggtatcgccatcccccactttggcatccagcgcgttcaggcggttttcgagctggagcagcgttgtcgacacggatgagacaaacgcacgcacctgtggattgtcagacggggtatactccacacggtcatgaatggcgctatgcgccacggtgcgcagtggcgcaaacgccacgggcttctgccagcccagcgtctcgacatcagcgtgaatcgccttttcgaagaaatcagtgagcttcagcagcgtcagcgaaaagcctttcatatccagcgcgctgaccagcggcgctgggccaatcaggtacgcgatgttctctttcagcgccgagtgcgccagctctttggtcagcagcgccatctccagcgccgatacgccgccaagattgttaatcaataccgcaaaacgcccctcgcccgcctgcgcgcataacggcgtcaccagggtgtcgataatggctttgctgttttgcgtatccaccacggaagccccgggctcgccgtgaatgcccaggcccagctcgacatggccttgcttaatgcgcccctcttcatcgtcgctgcccggcaggttgcacgtttgcatcgctacgcccaggctccagaggttatcgcaggcctgttgcgcaatatcccgcacctcgctcagggatttcccctgttccgccgcatagcccgcaatcttgtgcaccagtgccgtgccggcaataccgcgcggctgcttgttatccggcagcgcgatatcgtccgccacaatcaccatctccaccttcaggccgtagcgtttggccttttcagcggccaggccgaagttcaggcggtcgccggtgtagtttttgacgatcagcagacagccgcgatcgcccgtgaccgcgacgatggcattcagtaccgcatccacgctcggcgaggcaaacagatcgccacacacagccgccgtcagcatccctttgccaacaaacccggcgtgtgcgggttcatggcctgagccgccgccggaaattaccgccacgcggcttttatcccagtcgccgcgcgcgacgatccggatggccggatcgatatcaagcttgacgagattggcatgtggcgcagagagcagtatgccttcaatggcatcgttgaccagctgtttgcgatcgttaaagaagaatctggacatagtttcccactattttgtgaaccgtatgcaaaagcatagtccgcgctggataatgcgccgcaaagtcagcaatttactcagccgttttaccgtcaggttgcctatactccacccaggactacgagaggaagcgcatcatgagtacaccattgttaattgcccggacgctggaaaaagagctctatttactgcccgcgatggcgaaccgccacggtctgatcaccggcgcgaccgggacggggaaaaccgtcaccctgcaaaagctggcggagtcgctttcagaggttggcgtaccggtctttatggctgacgtaaaaggcgatttaaccggtgtggctcaggaagggacggcctctgaaaaactgctcgaacggctgaaaaatattggcatcacggactggacgccgcacggtaacccggtggtggtatgggacatcttcggtgaaaaaggccacccggtacgcgccaccgtctccgatctcggtcccttgctgctggcccgtttgcttaacctcaacgacgtgcagtccggcgtattgaatatcatcttccgtattgccgatgaccaggggttgctgctgcttgatttcaaagatctgcgcgccattacgcagtacatcggcgataacgccaaatccttccagaaccagtacggcaacatcagcagcgcctcggtgggcgcaattcagcgtggcctactgacgctggagcaacagggtgccgagcacttcttcggcgagccgatgctggagatcaaagactggatgcgcaccgacagcagcggcaaagggattattaacatcctgagctccgagaagctctaccagatgccgaaactctacgccgccagcctgctgtggatgctctctgaactttacgaacagctgccagaggcgggcgaccttgagaagccgaagctggtgttcttctttgatgaagcgcacctgctgtttaacgatgcaccgcaggtgctgctggacaagatcgagcaggtcattcgcctgatccgctccaaaggggtcggcgtctggtttgtctcgcaaaacccgtcggatatccccgataacgtactgggacaactcggtaaccgcgtacagcacgccctgcgcgccttcacgccgaaagatcaaaaagcggtaaaagccgccgcgcaaaccatgcgcgccaatccggcctttgataccgaagccgccattcaggcgctgggcaccggtgaagcgctgatctcgttcctggatgcgaagggcagcccgtccgtagtggaacgcgccatgatcattgcgccttgctcgcgcatggggccggtgaccgacgatgaacgcaacggcctgattaaccactcaccggtttacgggaagtacgaagacgaggtggatcgcgaatctgctttcgagatgctgcaaaaaggagtccaggcgacaacggaatcgcaggatgcgcctgccgctaaagggcagtctgtcgccgtggatgacggcattcttggcggactcaaagacatcctgttcggcagcaccgggccgcgcggcggcaaacgcgacggcgtagtgcagacgatggcgaaaagcgccgcgcgacaggtcaccaatcagatcgtgcgcggcatgctggggagtttgttaggcggccgtcgccggtagacgcggaacccacgggcggcccagcgccgaaccctgtacgccgttctcctgcaggtagcggtcaatttccaccatccccgtccagcggttctcacaccacagcggtgccagaagcgttggacggcgggcgctggccgagatgcggtggtagacaatctccgctggcgtgtggcgaatcatctcccccgccgtcaccgtatagtcctcaagctcgataccgcttaaccgcccggcctgccaggctttcgccataatgctgcccttcacgatatgcagaggatgaagcttgatgccgtccacgccggtttcaacgactttttccagcgtttcaagggcatgctgttgaccttcgccgggcagaccgacaatcagatgtgaacagaccttcagcccgcgctcgcgtgccagccgcgtggtgcgctggtagcaggcgaaatcatggccacggttgatacggtgcagcgttttgtcatgtaccgtttgcaagcccagctccagccagatctcgaagccttgttctttgtactcgctgagcagatccagcaccgcgtccggtacgcagtccgggcgggttcccacgcacagcccaacgatgttggcctggctgacggcctgctgatacatcgatcgcaatacctgcacctccgcccacgtgctggtgtaagcctgaaaataggccagatactgcttcgcacggttcaccaggctggcctgatgagcaagctgttcagcgatagagttatgttgctgtgcttcatcggcaaacgacgcaacgttacagaaggtgcagcccccgcgcccgatggtgccgtcgcgattcgggcagctaaacccgccgtgcagcgtcagcttatgaaccttttgcccgtagcgctgcaaaagatccccaccaaacatattgactaatttctgtaactgcataatctgatagaccgtcccggagaaaggggacaagcctgccatttttagcctctgtcggcgatgacctggatcaatcgccctggacggcctttatctatatgaataaataatcaggattactgcaatttcattcacgccgcatgtgattacttttccttatgttctgattgtttttttcatttatagcgccatcactgaaaaacagtgtgtttatgcgggtttgaagacaatgccagattattattctgctataaaaccgctattcagcacgctacagggataataccgctttcatatagtgagtcagatcacactccgctgcgctctttcagggcattcattcaatgtaaaattagttaaataaccttaaaatacaaaaagataaactctctttagcacatttttgtataaataagattgccatttgacctgtgtaccaattcccgataagttggaaatccgctggaagctttctggatgagcggcctgctcatcatatttatgcagtaattgagattccctctgaagcaagtcctcaaacttgtttacctgcgcgaaaggatgaaaaagagggcgaatgcgaggtccgcgtatgaaacgcaaaccccgtcgccatgctctttctgtgcctgtgcgccacggtaaagttcagtgggaagcccgacgagcctggggaggttcactgatatgttgtacgataaatcccttgagaaggataactgtggtttcggcctgatcgcccacatagaaggcgaacctagccacaaggtggtgcgtaccgctattcacgcactggcccgtatgcagcaccgtggtgccattcttgccgatggtaaaactggcgacggttgcggcctgctgctgcaaaaaccggatcgtttcttccgcatcgtggcggaagagcgcggctggcgtttagccaaaaactacgctgtcggcatgctgttcctgaaccaggatcctgaaaaggctgccgcctcacgccgcatcgtcgaagaagaacttcagcgtgaaaccctgtcgattgtcggctggcgcgatgtgccaaccaacgaaggggtgctcggtgaaatcgccctctcctcgctgcctcgtattgaacagattttcgtcaacgcgcctgcgggctggcgtccgcgtgatatggaacgccgtctgtttatcgcccgccgccgcattgaaaaacgtctccaggacgataaagagttctacgtctgtagcctctctaacctggtgaacatctataaaggtctctgtatgccggctgacctgccgcgcttctacctggacctggcggacctgcgtctggaatcggccatttgcctgttccaccagcgcttctccaccaacaccgttccacgctggccgctggcgcagccgttccgctacctggcgcataacggcgagatcaacaccatcaccggtaaccgccagtgggcccgcgcccgtacctacaagttccagacgccactgatccctgacctgcatgatgccgcgccgttcgtgaacgaaaccggctcggactccagctcgatggataacatgctggaactgctgctggcgggcgggatggatatcgtgcgcgccatgcgtctgctcgtgccgccggcctggcagaacaacccggatatggaccctgagctgcgcgcgttcttcgactttaactccatgcacatggagccgtgggacggcccggcgggcatcgtcatgtccgacggtcgtttcgctgcgtgtaacctggaccgtaacggcctgcgtccggcgcgctacgtcatcaccaaagataagctcatcacctgcgcctctgaagtcggcatctgggattaccagcctgacgaagtggtcgagaaaggccgcgtcggtccgggcgagctgatggtgatcgacacccgcagtggacgcatcctgcactccgccgaaaccgacaacgatctgaagagccgccatccgtacaaagagtggatggagaaaaacgtgcgtcgtctggtgccgtttgaagatctgtcggatgaagaagtgggcagccgcgagctggacgatgacaccctcgcgagctaccagaagcagtttaattacagcgcggaagagctggactccgtcatccgcgtgctcggtgagaacggccaggaagcggtcggctcgatgggtgacgataccccgtttgccgtgctctccagccagccgcgcatcatttacgactacttccgccagcagtttgcgcaggtcaccaacccgccaatcgatccgctgcgtgaagcccacgtgatgtctctggccaccagcatcggtcgcgagatgaacgtcttctgcgaggccgaaggccaggcgcaccgtctgacctttaaatcgccgatcctgctgtactccgatttcaaacagctcaccaccatgaaagaggagcactaccgcgccgacacgctcgatattaccttcgacgtgaacgacgcgagcctcgaagagacggtgaatgcgctgtgcgacaaagccgaacagatggtgcgtaacggtaccgtgctgctggtattgtccgaccgcaacatcgcgaaaaaccgtctgccggtgcctgcaccaatggcggtgggcgctatccagacgcgtctggtggataagagcctgcgctgcgacgccaacatcattgttgaaaccgccagcgcgcgcgacccgcaccactttgccgtgctgttaggctttggcgcgacggcgatctacccgtacctggcctatgaaacgctggcccgtctggtggatacccgcgcgatcgacaaagattaccgcgcggtgatgctgaactaccgtaacggcatcaacaaaggtctgtacaagatcatgtccaaaatgggcatctcgaccattgcctcctaccgctgctcgaagctgtttgaagcggtcggcctgcacgatgaggtcgccaacctttgcttccagggcgtggtcagccgcatcggcggcgccggttttgctgacttccagcaggatctggtgaacctgtccaagcgcgcctggctggcacgtaagccgctggatcagggcggtctgctgaaatacgttcacggcggcgagtatcatgcctacaaccctgacgtggtgcgcacgctgcagcaggcggttcagagcggcgaataccgtgattatcagcagtacgctgagctggtgaacaaccgtccggcggcgacgctgcgcgacctcattgccctgaatccgggtgatgaagcggtcagcattgacgaagtcgaaccggcatccgaactgttcaaacgcttcgataccgcggcgatgtccatcggcgcgctgagcccggaagcccacgaggcgctggcggaagccatgaacagcatcggtggcaactctaactccggcgaaggcggtgaagatcctgcccgttacggcaccaacaaggtgtcccgtatcaagcaggtggcatccggccgctttggcgtgacgccagcgtacctggtcaacgccgacgtgattcagattaaagtcgctcagggtgcgaaaccgggcgaaggcggtcagctgccgggtgataaagttaccccgtacatcgccaaactgcgctactcggtaccgggcgtgacgctgatctccccgccgccgcaccacgatatctactctatcgaggatctggcgcagctgattttcgacctgaagcaggtcaacccgaaagcgatgatctccgtgaagctggtttccgaaccgggcgtcggcaccattgccaccggcgtggcgaaggcctatgcggaccttatcaccatcgccggttatgacggcggtaccggcgcaagcccgctctcctccgtgaaatatgcgggctgcccgtgggaacttggcctggtggaaacccagcaggcgctggtcgctaatggtctgcgtcacaagatccgtctgcaggtggacggtggcctgaaaaccggcctcgacatcatcaaggcggcgattctgggtgcggaaagttttggcttcggtaccggcccaatggttgcgctcggctgtaaatacctgcgtatttgccacctgaacaactgcgcaaccggcgttgcaacccaggacgagaagctgcgtaagaaccactaccacggcctgccgttcaaagtgaccaactactttgagttcatcgcccgtgaaacccgcgagctgatggcgcagctgggcgtgaagcgcctggtagacctgattggccgtaccgacctgctgaaagagctggaaggcttcaccgccaagcagcagaagctggagctgtctaagctgctggaaaccgcgcagccgcatcctggcaaagcggtctactgcaccgagaacaacccgccgttcgacaacggcgtgctgaacgcgcagctgctgcagcaggcgaaaccgtatgtggacgacaagcagagcaaaacgttctggtttgatatccgcaacaccgaccgttccgtgggtgcctccctctccggctacattgcacagacgcacggtgaccaggggctggcagccgatccgattaccgcacacttcagcggtactgcgggtcagagcttcggcgtgtggaacgcaggcggcgttgagctgtacctgaccggcgatgccaacgactacgtcggtaaaggcatggcgggcggtcttctggcggtacgtcctccggtcggctcagccttccgcagccatgaagccagcattatcggtaacacctgcctgtacggcgcaaccggcggtcgtctgtttgccgcgggccgtgcgggcgagcgttttgcggtgcgtaactccggtgctatcaccgtggtggaaggcattggcgataacggttgtgaatacatgacgggcgggattgtttgcgttctgggtaaaaccggcgtgaacttcggcgcaggcatgacgggcggttttgcctacgtcctggatgaagacggtgagttccgtaaacgcgtgaaccctgaactggtagaagtgctggacgttgacacgctggccattcacgaagaacacctgcgcggtttgattaccgaacacgtgcagcataccggttcttcgcgcggcgaagagatcctggctaactggccggcgttctctgcgaaattcgcgctggttaagccgaagtccagcgatgttaaagccctgttgggtcaccgtagtcgtagcgcagcagagctgcgcgtgcaggcgcagtaaggaattcagatgagccagaacgtataccagtttatcgacctgcagcgtgttgatccgccaaagaaaccgctgaagatccgcaaaattgaatttgttgaaatctacgagccgttttcagaaggccaggccaaagcacaggcagaccgctgcctgtcctgcggtaacccttactgcgaatggaaatgtccggtacacaactacatcccgaactggctgaagctggccaacgaagggcgtatttttgaagccgccgagctgtctcaccagaccaacaccctgccggaagtgtgcggccgcgtgtgtcctcaggatcgtctgtgcgaaggttcctgtacgctgaacgacgagtttggcgcggtgaccatcggcaacatcgagcgctatatcaacgataaagcgttcgagatgggctggcgtccggacatgaccggcgtgaagcaaaccgaaaagcgcgtggcgatcatcggcgcgggcccggcgggcctggcctgtgcggacgtgctgacccgcaacggtgtgaaggcggtggtctttgaccgtcatccggagattggtggcctgctgacctttggtatcccggcctttaagctggaaaaagaggtcatgacccgtcgccgtgaaatcttcaccggcatgggcattgagttcaaactgaacacagaagtgggccgcgacgtacagctcgacgatctgctgaaggattacgacgccgtgttcctgggcgtgggtacctatcagtccatgcgtggtggtctggaaaacgaagacgcgccgggcgtttatgacgcactgccgttcctgattgccaacaccaagcagattatgggttacggcgaaaccgctgatgagccgttcgtcagcatggaaggcaaacgcgtggtggtgctgggcggcggtgataccgcgatggactgcgtgcgaacctccattcgtcagaatgcggcacacgtgatctgcgcctaccgtcgtgacgaagagaacatgccgggctctaagcgtgaagtgaaaaacgcacgtgaagagggcgtagaattccagttcaacatccagcctctgggtattgaagtgaatgccaacggtaaagtgagcggcgtgaagatggcgcgcactgagatgggcgcaccggatgcaaaaggccgtcgtcgcgccgagatcgtggccggttctgaacacgtgatcccggccgacgccgtggtgatggcgttcggtttccgccctcacagcatggagtggctggcgaagcacagcgttgagctggactcgcagggccgtattattgcgccagaaggcagcgataatgccttccagaccagcaacccgaaaatcttcgccggtggcgatatcgttcgcggttccgacctggtggtgacggcgattgccgaagggcgcaaagcggctgacgggatactgaactacctggaagtgtaaaataaaagggaataaaccttccggtttattccctttgttacctacagcgtaatcaaaaaaaatttcagatatttcagcatgaaggttgccagcctatcaatgcttgagtcagctgcaagaaaaaaacaggcatttcattggcgatagaaataatgaagagctattttttactccccgaaatgctacctcgtcagcagagtccaggttaagtcactttccagtacggtttgatcggtgatgcggctaaacgcattgtcatccagcacaggtgatagcgtgacccggaaattcatctgctggcctgaaggcacctgattattatcaaccgcaataaccgcttcattattacgcacataaaacggcgaaggcgtgccgctttgcggagtaaaaccgagctgatcgaccgttttgccgacggtgtaatttttaccatcgatggtcatatcatcgattttaaccgccatcccgccagactggccgaatgtgaagcgccctttatcgcctgccgtcccctgtaacaacaccgccatttgctgcggctgcggacagtaaacattaacgttgagggtacggtccgccattttgtgccagttctgctgggttttatcgatattatctcgacgcatttcatggtaatccaccaccggctgcgaaagcgatatttggcaatcttccgcatttgcagtcgccacgaagaaaagtatccccagcgctgttaatcctactgtttgttgataattcatcggcatactccgtttacttcttcatagaaggcgtcttcattgcgtttctcaggaagagcgaaatcgagtttgcacaaacgattgttgttggcgtccatggcgtacagcgccggtaactgatccgcatcgttgataaagacatgaccatcatcaacgaccgtcacaatgtagttgcccttctcatccacgattgccagcccttttctcagcggctgaccatcggtttgcttcatacgcagcatcacacgtcggctgttcagcaccttgaagtcaagctcgctgactgaagcgtgacctgcggcgatatatcgggtgccgtttgccagcgtcatattctgcggcagcttgttggcatccacttctatacgcgaattgcgccactcgtttagcgaaggtacaaccgcctgtccccaggcatcggtccagaccgtaccctgtggcgtagcgatttctaccccgcttttcttctcgctcagtctggcaatcgcaaaggtatcgcgaatcgcatacggcgagaacgtcacgccatttttgtgcatagcgatgccgcccgccagggtggcattatagttacgctggtgatcaccgttgctgccaccacccacgctcagctgggtgtaatgcaggttggtgttaaggttaccgttgaagctattatcgctggacgactggtcacgatcggcggcgatatagtagtgtgtgtttttgcccagcgaaccgctgttggccacaccgtaagtggtattgtcgccctgcttgcgcatgtaagtgctgacagactgccccggactcagcggaatgctgacgttgatgtacagcatttcatcatcctggtcgtcatcgacgttgcccacagcgctttgccagttggcggtaacgctggcatatttaaatgtcttaccccacgacagaagcagatagcgggaatcctcagagttcccgctgctctggttatagttgaagcctgctgagaaaacgcctgccagaccggatgagaaacgtatgctgccggagtaggcgttatcgtacccctgatagtcatcgtccatcgcttctgccatctcacggtagccgccgctgtagtgcgtcgcgctggtggaaagcgatacatgggaggaaagcgtaagatcgcttcctagctcggttttaagtccactgttgctgtcaccaaacgactctttgcttgccgcaaccgtcgtggaaacagaccaaagatcgctgataagaaaatcggtacgaccgccagctgcctggtaatcttgagcggcagtaccggaggccagaaggttcatccacgggaaaatgcgccagccgtcggaaacgttcatcaccagcggatcgctgtagtcgctatcgatgctgcgtacctgaccggcagacacggtaagcccctgcgggcgagaaagatttcgctgcttcactgcggcagcaggaacaataaagtgattcgtggagccgtccgactctacgacggaaacgtctaaatcgacgttgttacgcgcaaccggcacgtcatccagcgtaaatggtcccgcgggcacgagcgtactgaagatcagctgattgttctggcgaatctccacgcgagcctgggaggaacgggcaatgcctgacacgctgacgccgctgccgtcttttgtcagcccactagtcggcataagctggataccggtaatgggtatgccgctcagcacattagacatggcattaatttcaccgacctgcatggttaacttctgcgggacaaaaacatgctctgcgtaggtgtaaatgctgtcggcatttttcttgccattgtcatccgtcaggatgtaattactgcgaagcgaccagtcaaatgcgttaaaacccgcttccagattggcctgcgaatagcgggttttgtcgctaccgccatattcgttacgggtgctgaaaagcgaatagttgagcatcccggcggcaccgccgtgctggaagtttcggatatccgacgacaggctgtttaccgcttcaggcggcagatacaactcaacggcttcctggtttggcaacgcgttgattaccgctttcgggtagtcgtcgcggatgttgtggcacgcctcgcctgccttcagggggactggcatgaggcctgcgaaatcaagcagatcgttatcaaaacacagcacgccgtccttattgaaacggacggcggccattccgcgatcttcaccattcactttaacgttcacggaatgggttccgggcagaaaacgcggtgcttcagcgaaataatggttcaagtcgctcgataaccccagcgttttcattacccccgtatcaaacgtcacttcccttgcgagtacggaggcggagtcaaacatcatcagaggcaaggtgccgcagagaactgcgcggacacaaagtgcaatacggctttttttattcaccgtttgatccctatattatttatttaattctgaggtaaaactcggcacttcaatgccataacggctggccgggaaaaatttaacgtggctatcaccgctgctcgttttgttcaacgcagccgtcatcgtctcacctggcagaaggtaagttttggaaagcgtggcgtttgcgcctgaaggttgtaatacgactttttgtgccagacgaacaacgtacttacttgggttggttacttttacagaagatccgaccgtagaccatttgagatatttccacgcatccgtcacgacccccagcgtagccgggcgtattagcactggaatatcctggcgaatattaatgccaattttaatttttttatcgtcattttttggtggaataccgtcaaatgtgacgcgttttaaatgctcaacatccagcggctgcttgctttgcaaaataaaacgaagctgctgcgtttggcccggctcaaggcggaccacaggctgcgtgacgatcaacttaagcccctggtcgtccggcaggtctacaacgttcgtatataataaggatgggtgtgaatccgtattttttacgttaatggtaccgctgtgtgtggcttcatcaataattagcaggctggtttctggcaccataccttctgcatgcaccgcaaaattggcggaaaataaagcgacagtaaaaagtgttttaaatatattcgaccttatgcattgcataatattatctccttgatagcccaacagaacattccatgtttatcgtgctgttaaaaagagagtaaatgcagaacattcactctctggattattttaaaattacttttactcaataaagtcttacagataacgcaggctgatggtcaactgaccgtcaagctgagtatcgtccgtaatcgccagagttgtggtgtcctgaagagccagtgaagttgccagcgggaaggtcgcggtctagaaggccagcggatccagagaacctgcagacgcaacggtgaagtcacgaatatggctgccctgagaagaaccgttggtggatttggtccaggtacccgtcgcgttctgctgatagattggatctaccgcagcaccatcagccgttacgctgtctactttaactagcagagcgtaagagccgatgttaacgccacccgcggttttgcccacaccgtaagtttggctagcgcctttaataataccaccaccaaacataccgttttctacggtcagacccgcgttagtatccgcgcgatcgtcaaccatattccaggacacttttgttgctgcggtgcagttaatggtcagatcgatattcttctgtcccaactggttgacagcagaagcgttcagactgcccaaattaattgtaccgtagtcaacagtaccgccgttgcttaatactggcgtacatgctgcattcgtcagcgtacctttaaccttcagtacagctgaagggtctgcagcaaatgctgaagtcacacacagagaaagcgcagtagcgagtaaaacttttttcacttgttaatccttaacatatgagtaattgcaatatttaacccagtaatgataaatacctttaccagttactgattgtcgtcatgcttgtcagcatgtgcacatagtattgtttttataaatacatgcaatttagcaaaattaactattctattaaggataaccacaaaatgattttttccttattttattaaggaattacccaatcaaaaaagagatcaacatcaaaaaaataatattactcagaattcctctttactttcctcatcgttttgatattagttcacacctcatttattcatggggtttataaatctatttaattattaatcaagcaatgaagaaacaagagatataaacaatgcttatttaaaaatattacaacggtagattgatacagaaataaaaaaagccagtgatatcactggctttttacaaacggcgcaagcggatttatttcacaacgcgtagcgctgggcgaccaccgcgcggaggcggatcgtcatcagggtcattgtcatcttgatgatcgggtttgtcgccatcgataattgacatcaccgtgtcgctttcacgctcatcagatgcgttgtcatcattcaggctggcaacgtcttcatcatatgccgcttccggctcgaacatggtacccgcaccgttttcacgcgcgtagatagccagcacagcagccagcggtacggaaacctggcgcggtacgccgccgaaacgcgcgttgaagcgcacttcatcgtttgccagctccaggttacccaccgcgcgcggggcgatgttcagtacaatctgtccgtcacgtgcgtattccattggaaccagcacgcccggcaacgtcacatccacaaccaggtgcggcgtgagctggttatccagcagccattcatagaaggcgcgcagcagatacggacggcgtggggtaagttgtgacatttccacagtcattagcctcggccgagacgcatttcacgttccggttcagttaaagatgccaggaaagagtcgcgctcaaagacgcgagtcatgtagcccttcagctctttcgcgccaggaccgctgaactctacacccaggattggcagacgccacagcagcggtgccaggtagcaatccaccaggctgaattcatcgctcaggaagaacggtttctgaccaaacaccggggcgattgccagcagctcttcacgcagctgcttacgcgcagcgtcggcttccgcagcggatccgctggtgatcacgttcatcagcgaataccagtctttttcgatacgctgcatgtacaggcggctttcaccacgcgcaacagggtaaacaggcatcagcggcggatgcgggaaacgctcatccaggtattccataatgatacgggattcccacagggtcagctcgcgatccaccagcgtcggtacgctttggctcgggttgagatcgatcagatcctgaggcgggttatccttttccacatgctcgatctcaaaactgacacccttctcggccagcacgatacgaacctgatggctataaatgtcagtaggaccagaaaacagcgtcattaccgaacgtttgttggcagcgacagccatgaaaacctccaggtatattcagaatttttactgctaccagcccaacaggggccagccagatgttgtatcgcccatcccagagaagacacattgttcaataatcgaacaaaaatcgagtattcaccgatatttgggcagaaaattggatgatagtttaccagattttgatggctttgtggtgaggggattctggaaatgtggaaaaagagaagatatatgcatggatattgtggataacctgcgcattatccataaaaaaacccgccgaagcgggtttttcgccaatcgttctgcgtaagcagaatggattaacgtttggagaactgtggacgacgacgtgctttacgcagacccactttcttacgttcaacctgacgcgcgtcacgagtaacgaagccagctttacgcagttcagaacgcagggattcgtcgtactccatcagagcgcgggtgataccgtgacggatcgcacctgcctgaccggagataccaccacctttaacggtgatgtacagatccagtttttctaccatatcaaccagttccagcggctggcgaactaccatgcgggcagtttcgcgaccgaagtactgttccagagaacgctggttgattacgattttaccactgcccggtttgatgaaaacgcgagctgcggaacttttgcggcgaccagtgccgtagtattgattttcagccattgcctataatcccgattagatgtcaagaacttgcggttgctgtgccgcgtggttgtgctcgttgcctgcgtaaactttcagtttacggaacatagcacgacccagcgggccttttggcagcatgcctttaaccgcgatttcaatcacacgctcaggacggcgagcaatcatctcttcaaaggtcgcttctttgataccaccgatgtggccggtgtggtggtagtacattttgtcagtacgcttgttgccggtaacagcaactttgtcagcgttcagaacgatgatgtaatcaccggtatcaacgtgcggagtgtattccgctttgtgcttaccgcgcaggcgacgagccagttcagtagccagacggcccagagttttaccggtcgcgtcaacaacataccagtcgcgctgtacggtttctggtttagctgtaaaagttttcattaaaagcttacccaaataataagttacacgttggtgaacacccaaacgtttagtcagttgaggttcacacgacaaagtccggcaaacctaccccttcgaatagcacatgccgacacatagaaagtttcgggaaaaaaaaccttctcgtaacgtggggtcgcaagattatagagaagttgaggtcaaagatcgacccttaaatgtgattcaaattgggtttttcgaggcggtggaaaatgccgggtggcggctgcgcctcacccggcctacaagtcccccttcacagggagagggtggcatttatggcatatgctccagcttcaggtattcctcgctctgcatctcctgcaggcgagacaggcagcgctggaactcaaactttagccgctccccctggtagatctcatataaaggaacctcggcgctaatcaccagcttaacgtggcgctcgtaaaactcgtccaccatcgcgatgaagcgccgcgcctcgctctccatcagccgcgtcatcaccggcacatccagcaccatcacggtgtggaacagacgtgaaagcgcaatgtagtcgtgctggctgcgggcatcaacgcacagcgtcgtaaaggagaccgccagcgtttggttttcaacgccgagcgttggcagcgggcgatggttaatctcgagttccggggcgtgctcgcgttttgcccccgccagcgccagccagagtttatccatctcgcgggtggtctctgcatttaacggcgagagccacaggtgcgcctgggttaaggtgcgcaggcgataatcgacaccggcatcaacgttcataatgtcacaatgctgcttaatggcgtcgatggcaggcaggaagcgtgcccgctgcaggccgttgcggtaaagctcatccggcggaatattcgacgtggccaccagcgtgatcccgcgggcaaaaagcgctttcatcaggccgcctaacagcatggcatcggtgatgtcagacacaaaaaattcatcgaagcagagcacgtccgtttccgccttgaacctgtcggccacaatctccagcggatcgcttttaccctgcagcgcagtcagctcttcatgcacacgcagcataaagcggtggaagtgcagacgctgtttacgcgcccccggcaggctctggtagaacatgtccatcagccaggtttttccgcgaccgaccccgccccacatataaagaccgcgcaccggcgcgtgggcctgtggcgttttttttccgagcaaccgtccaaatgccgcctttagcccgccattctgttcggtttcagcgggtttggccgtgagttcctgataaatcatctccagacgacttaccgcctcacgctgtacgtcatccggctgatgagtgccctcgtttagggccagttgatatcgcgatgcaggggacaggttttgcataatcttattgttattccttcaattaacgctcaccagcagacgtgactgatgaaaaaaaggccgttctacactacgcgatgatacgtcaggattccacttctacggaaatagcggttatagtggcattatcaggcacaggcaggagccgagccaacaccctacggaacaacaagacaacgggagaagttcatgacctgggaatatgcgctaatcggtttagtcgtcggcatcgtcatcggtgctgtggccatgcgtttcggtaatcgcaaattgcgtcagcagcagtcactgcagtacgaactggaaaagaacaaagccgagctggaagagtatcgtgaagagctggtcagccattttgcccgtagcgccgagctgctggacaacatggcgaccgactatcgtcagctgtatcagcatatggcaaaaagctccagcagcctgctgccggaaatgacggcggaaaccaatccgttccgcaaccgtctggcagactctgaagccggtaacgaccaggcgcctgttcagatgcctcgcgactattcagacggcgcgtccggcctgctgcgcggcggtgtaaaacgcgattaatcgcacaacctgaatttattttacgggcgcagtgattgcgcccgtcctttcttcctgaccccagctatcatttagttaaacacctcattgttcagcggtttaaaattcaataacatcaacgtgtttttggggccgtttttcctttattccaggttacgagagtcaacatcgatgaagaaaaaaaaccagctgttgagcgctatcgcgttaagtgtcgggttatctctctcggcgtccgtccctgtatttgccgcccttccctcccaggtgcctggccaggcggccattccaagcctcgcacccatgctggaaaaagtgttgcctgcggtggtcagcgttcaggttgagggcactgcggtacaaagccaacgcgtccctgaagaactgaaaaaatattttggcgatgagtctcccgaccagcaggcccagccttttgaaggcctgggttccggcgtcattattgatgcggcaaaaggctacattctgactaacaatcatgtcatcagccaggccgataaaatcagcgtccagctaaacgatggccgcgaatttgatgccaaactgattggcggtgatgaccagagcgacattgcgctgttgcaggtacaaaacccgagtaacctgacccagattgccatcgcggactccgacaaactgcgcgtcggtgattttgccgtcgccgtgggcaacccctttggcttagggcaaaccgccacttccgggatcgtctccgcgctgggacgcagcggcctcaatctggaagggctggaaaactttatccagaccgatgcctcaatcaaccgcgggaactccggcggggcgttacttaaccttaacggtgagctgattgggatcaacacagccattctggccccgggtggcggcagcatcgggatcggttttgcgattcccagcaatatggccaaaaccctggcgcagcagctcattcagttcggcgaaatcaaacgcgggctgctgggtattaaaggtatggagatgagcgccgatatcgctaaagcgttcaacatcaacgtacagcgcggggcgtttgtcagtgaagtgctgcctaactccggctcggcaaaagcaggtatcaaatcgggcgatgtgatcgtcagcctcaacgacaagccgctgagcagctttgccgagctgcgctcgcggatagcgaccaccgaacccggcgccaaagtgaagctgggtctgatccgtgacggtaagccgctggacgttgaagtgacgctggataagagcacctcctcctctgccagtgcggagctgatcgccccggcgctgcagggtgcgacgctgagcgatggacagctgaaagacggtacgaaaggcattcgcatcgacaccgttgagaagagcagccctgccgcacaggccggattgcatcaggaagatgtgatcattggggtaaaccgcaatcgcgtgcagtccattgccgaactgcgcaaggtgatggagagtaaaccggcggttattgccctgcaggtcatgcgcggcaatgagtctatctatattctgttgcgctaagcatttgcgacccggacatcaccgctgcgtgtgatgtccggataactcatgttatgctgcaaatcgttccttttttaacgacacgcgcatcatgcttttaaagctcttacgttctattgtcatcggtttgattgtcgctggcctgctgctgctggcgctgccgtctttacgtcagttcaataaactgtcggcccctcagttcgatagcacggatgaaacgccggccacctataaccaggccgttcgccgtgccgcacctgccgtagttaacgtctataaccgtggcctgaatacctcagcccataaccagctggagatccgcactctcggctccggggtaatcatggacgagcgcggctacattattaccaacaagcacgtgataaacgatgccgaccagatcatcgtcgccctacaggatggccgcgtgtttgaggcattactcgttggctctgacagcctgactgacctcgccgtcctgaagattaacgccacgggcggtttgccggtcatcccgatcaaccgtaaacgtaccccgcatattggtgacgtcgtcctggcgattggtaacccttacaacctgggccagaccatcacccaggggattatcagcgcgaccgggcgtattggcctcaacccatccgggcggcagaacttcctgcaaaccgatgcctccatcaaccacggtaactccggcggtgcgctggtcaactcgctgggcgaactgatgggcatcaacaccctctcgttcgataagagtaacgacggcgagacgccggaaggcatcggctttgccattccgttccagctggcgaccaaaattatggataagctgatccgcgacggacgcgtgatccgcggctatatcggtatcggtggccgtgaaattgcgccgatgcatacccagggtggcgggatcgatcagatccagggcatcgtggtgaacgaggtggcgccagggggtccggcggccaacgcggggattcaggtcaatgacgtcattgtgtcggtcaacggcacaccggcagtttctgcgctggagacgatggaccaggtggcagaaattcgcccgggctctatcatccctgttgaagtcatgcgcaacgataagaaactgacgctgcaggtcaccattcaggaatacccggcaacgaactgacaggcataaaaaaacggagcgataagctccgtttttttgccgggagacggtccgttttacttgttaacgaactcttcacccagggtgatatctttcttcagcgtatccagcatgccttccatcgcgtgttgttcaaacgcgctcagcgtaccaatggatttacgctcctcgataccatttttgcccagcagcagcggctgagagaagaagcgagcgtgttcgccatcgccttcaacgtaagcgcattcaacaacgcctttctcgccctgcagggcgcgaaccagtgacagaccgaaacgtgcagccgcctggcccatagacagggttgcagaaccgccacccgccttcgcttccaccacttcggtgcccgcgttctggatgcgtttagtcaggtcagccacttcctgctcggtgaagctcacgcctgggatctgcgacagcagaggcaggatggtaacgccagagtgaccgccgatgaccggcacttccacttctgttggctgtttgcccttcagctcagcaacaaaggtgttggagcgaataatatccagcgtggttacgccgaacagtttgtttttgtcgtaaacacctgctttcttcagcacttctgccgcgatagcaacggtggtgttcaccgggttagtgatgataccgatgcacgctttcgggcacacttcagcaatctgctgcaccaggtttttcacgatgcccgcgttgacgttgaacaggtctgaacgatccatgcctggcttacgcgccacgcctgcagaaatcagcaccacgtcggcaccctgcagagcaggacgcgcatcttcaccggagaagcctttgatttttacagcagttgggatgtggctcaggtcaaccgccacacctggggttaccggagcaatatcgtacagggagagttctgagcctgaaggcagttgggttttcagtagtagggcaagcgcctggccgataccaccagcagcgccgaggactgcgactttcatcctaaactccttattatggttaacttaagtatctgtaaatccgttgcggcgaccataattcagcaagtgtttaattacaattttcgtagctaaagaatttgaggtcgcgcgactttatctctcttcagaaggctatctgacgacagacggcaacgaattaagaggtggttacaatacaccctgccccgccaccaaaacaacatcattttgataacatttaatttacttttaagcttatttgcgcggcgtgacccaggcatgttttctgataacgaattctgataaaatcactccctttcataacattatttcagcctggcgctgagtagatagtttgcataaaaattcatccacatgcataataatgttgtttctatcgtcatattccgggtgacttatgcgaagctcgtctaagcaagaagaattagtaaaggcgtttaaagcgctacttaaagaagagaaattcagttctcagggagaaattgttcaggcgctgcaggaacagggcttcgacaacatcaatcagtcgaaggtctcccgcatgttaacgaaatttggcgcggtacgtacccgtaacgccaagatggagatggtctattgcctgccggctgaacttggcgtgccgaccacctccagcccgctcaagaatctggttctggatatcgactacaacgatgccgttgtggtgatccacacaagcccaggtgccgcacagctgattgcccgcatgctggactcattgggtaaaacggaaggtatcctcgggactatcgccggtgatgacaccatctttaccacgccagccagcggtttctccgttaaagatctccacgaagcgattctggttctgttcgaacaggaactctaatcccctttccccgtagcgccgctgcggggatcgttctgcctccacaccgtttcgccctctttttcactgcctctgcctttgacaaatagtgctttttaccacccattaacattcacctagtgaatgccaaatcaaaaaatcgcacaaaaaatcaaaagctgatatccatatgatttcattagacataaccaactaaaatgtgcaaaaaatacccaatattatgcaatttggttataaaaaaaagactgtttaacacgtaataacaatagaaaccattagtctggtattaattttttccgttattagtgtatacttgattttgtgatgatggtcacgaaacaagaccccactaaaaaattcgacgaggtaaaaatcatgaaaatcaaatcaactgtagcggcgctgagcgtcctgtctgtcctgtcattcggtgccttcgcggctgacgctatcaatgctgaccaggcgcaatcccgccaggccatcggtacggtttctgtcggcgcggtcggcacatcgccaatggacatgcatgagatgctgaacaaaaaagcggaagaaaagggtgcgtcatcctatcgcatcatcgaagcgcgctctggtgcacactggcacgccaccgctgagctgtacaaataagtttgagcaataactgaacacgtaaatctccactcaacggcaccaggcataaaaatagcggttcaacccttctcgccgttgagcaaaaaccctattcaggagtaaagactatgaaaaccaaattgatcatcgcaaccctcggtctggcatctgttctctctttcggcgcaagcgcagccgtacagcaggtgaatgccgaccaggcacaaaatctgcagcctatgggcagcatctccgtgacgtctgttaccggctctccgatggatatccgtcacgaactggctgccaaagctgaaaaagcaggtgccagcagctatcgcgtcaccgaactgaatcagggtgaccactggcatgcaactgcagaactgtataaataaaccctcgtcgtatctcatcatacgacttgcccctggcctgatggtcaggggcttttttcattcagtgccgcgcgttaaaacgcagctgcccttccagctcttcttccgcttcatcgaacagtaatatcagtgcgccaaagcgtctgcgcagcttatcgggcaaatggatgaactcaatttccagcggtagcggcagcaggctaccggtcaccacgtcccacagcgtatccagattcgtcacgctttcccgttcaagatcaaacacccggataaattcacggtagaagtcttcctgactgtcgatctcgtcaaaatcaaaggtataggttttcattgccagccacccagtccaggcgagcggcagatgccgccctgtctattataatcccccaatgtgaagggttttcacttccagatactcttccaggcccagcacggaaccctcacgacccaggcctgactcttttacgccgccaaagggccccagctccgtggagacggcacactcgttaatgccgatcatcccgctctcgatcgcctgcgaaacgcggaaaacacgtgagagattctgggtatagaagtaagccgccagcccgtagggcgtattgttggcacgctggataacttcatcttccgaggtgaaacggaaacacgccgcaaccgggccaaacgtctcctcctctgccagcttcatgccttcatggcagtcgcccagcacggttggcatccagaaattcccgccaagcggatggggcttaccccctgccagtacggttgccccccgtgagacggcatcgtcgacatgctcacgcaccttgtcgaccgcagcagattcaatcagcggcccgacaacaacgccctcgtcaaggccattccccaccttgagcgccttcacggcatcggcaagtttattcacaaacttgtcgtagacggtttcctgaatataaaaacggttcacgctgacgcagacctgcccggcattgcggaacttgttggcaatcacccccttcaccgccgcgtcgatatctgcatcctcaaaaacgatatacggggcatttccccccagctccatcgagacttttttcatggtttcggcagcattacgcaccagcgttttgccgacggaggtcgagccggtaaaggagattttacgcacgtctcggcttgccataatcgcatcgctgatttcatgggtattcccggccacggcgttgagcacgccgtcgggtacgccggcctgttttgccagggaaaggagcgcaaaggcactgagcggcgtgttattggccggtttgatcactccggtgcaccccgcagccagggccgggcctaatttgcgggtgagcatggccattgggaagttccacggcgttatcgccgccaccacgcctatgggttcgcgggtcgccagaatgcgcgagccgggtttgatcggcggaataatttcaccgttggcgcgcttggcctcttcggcaaaccactggataaagctggcagcgtactccacctcaccttccgcttctttcagcggcttgccctgctcggtggtcattaactgcccgagccagcttttattctcaataatcagttcgtaccagcgataaagaatcgccgagcgctctttcgcggttttggcacgccaggccgggaaggctttggtggccgctgcgatagcctcttcggtttgtgctttacccgctttcgcgactttcgcgatgacttccccggtagcggggttaagcacatcgaaggtcgtgtccagcgttttccagatcccgttgaccagataaccggtctgaaaaaggatgtgatcctgaagcgcctgggtcgtcatgtgtcctcccttcctgaaatgtaagaacgtgctggaataagtatagccacaaaaaaaccgacgcttttggcgtcggtttttttacttcagtcagctatccgtgagggcattctggtagcgatgcagcatcaacaccagccgtcctaccggctcggtcacctgaggcggcgcttcccaggttttaagcttctcctggtaaatatcaagctctgcaagcagctgcgtaaagtagcgacgtcgtttgtcatcactgctggcggaaagcacgtggtccgcggtacgacgcagctggcggtgccaggccgacagatcgtcgttgatcggcaccggcgcattgcgcagacgctggtgtgcaatgatcatggtcagcgccaggcggaacttggcaatgtcgcccgggaacttgttcagcagtaaaaacagctgctggtagagcgcggggaggtggttctctttacggcgcgcggtgttggttgtcatcgacgacacggcggccgacacaaactggttcaacagcacgcggcccgttcttgcctgcgaattatcgcggaccagcagaatcaccatcatcgccaggaaacagcccaccagctgacctaacgcgctgtcgaggaactggctgaaatggaaggtcatcgggttatccagcacgatgatgttaatcgtactcgccagcgcccccagcgatcccagacgccgcttttgcacttctataccgataaagaacgccatcaccgccaggctaatacagagcagcagcatgctctgctgggtagacgggatgatgaccagaaaatagagcgcgccgatcggcagggcggcaagggtgccgtacaggaaatcgatggcgaccatacgcgggttaggcagacgcatcgccagtgcggtcacgacggcaatcatcaccatcgcgccgctgccggacgtccagcccgtccacagccagaacagcgtgccgagcatacaggcaagcgtcgtacgccagaagttgaccatcgcgtgatggcgctcggcggattccggcttgatcaccacttcgccctgcagtacctcttcttccgccgcgctgattttggtattcccgatcacgccgcgtttcagcagcaggtagcgcgtcgcggcgccgacccaggtgtagatcgttaccggcgtgtcacgttcccctgtccaggcaataaccctgcgcatacgcttaagctgcttgtgcacgtcctgcaccgtttccactggctcagcgaacagttcgcggaacgtatcggtgaccacttccgggcgcgtgttctgaatcaggtaggtttcacatgcctgggtaatcagcgttaacgagaccgtattaagggctttcagacgacggttagcgcgagcccagcgtgacgactccatattgagattgctgcgcatcccttccagcgcctgcgtgcggcgaaccagcccgctccaggctttatccacctcttcgctgtcgccgtgtttaatgcagagctgcatcagctggtactgggcgacaatcagcgcgtcaagctcacggtcgacttcctgcttgatggagcgcggggagaacagcaggtccgcgacaattgcactcacgataccaatgacaatctcactgcatcgctccaccgcaaactgcggagccagcagcggctcggactggatggtgatgataataatcagcgcggtatagcccgccaggccccaggcataggagttctccactttcaccagagacgagatccaggtgcagaagcccgcccagatacagcacaccatcagcatcagcagcggcgtgcggatcatcaggataataatggtgagcgccgcgatacagccgatgaacgtcccgatgatacgcagcattccgcgatagcggatcgcgcctgaatagggttccccacccgcagcaaaggcgggacccgccgcgacaatcgcggccgtcagcactgcccagcgcggggtttcaagctggaagtggaagccaacaaacagcgccagcacaatggcacacgccagcttcacggcgaagcgaatgtgctggctggcgatggaaaagatgcccatagcgattaaccaaactcgcgcagacggtgggcgattttacggaagaatgagtcctggctggcatcccgatctttttcaccggtaatcaccaccgtcgccgtggtacccgcaggccacagattgccctgctgttcatccaggtggatacggaccggcacgcgctgggccagacgcacccactcgaggttggaatccaccgttgccatcccttttgcatcacgcgaactgctggagttggtcacccctgcggcgacgctgtcgacggtacctttaaagacgcggttgctgcccagcggcgtgatttctgcccgatagccgggacgtacgccttccagcttggtctcttccatataggcgagtacatagaaagagttctgtttcaccagcgccacggcggttgagccacgggtaatgaattccccggcatagacgttaaggttggtcacccagccatcagacggcgcgcggatcacggtacgctccagatcgagcttcgccagatcgcgcgttgcttgtgctttcgccagctggtgcagcacggtttgcagcacgttgttggactggtcaatctcttcacgggacattgcctgaacgccaagctgattacggcggcctgcctcacggcgtttctccgcagccagcgcctggtaataggccacgtccgcttccgcctcttccagcgctttctggtaacgaggctggtcgatggtgaacagaacctgatcttttttcaccagctggttatcgtgaacgttaaccgccgtgataagaccggccacgtcaggggcgatggccaccacatcggcgctgaagcgtgcatcacgcgtccacggtgattcggtgtaatagacccaggcgcggaaaatggcaatgaaggcgaggataaccagcgccatggtgatggcagtgcgggagatttttcttgttagcgttttcacatcaacctcagacaaacatgcgcgatatcaggtaaaataggcagcaatacagcgcggtattgaacaatgcagggtgccagacgaaatcgtagatcccggtagggaccagcaccttgcgcaccagccagaagatcgccagtgataaaagaagctcgaaaaatatcggtgggaacgacagaccgaacaccacgataacgggaaacagactcatgttgaccttgataagagagagtgcaggcttcagaattttttagcgcacgccaccgcaggagagcaagaaacgccgggcgagaatggcgcagccgttatgtaattaataatatattaacgtaactgttatgctgttatctataatatgtgatctaaatcacttttaagccagagtgaacaatggaacgtttaaaacgcatgtcagtcttcgccaaagtggttgaactgggctcctttaccgccgctgcacgccagcttcagatgagcgtctcctccatcagccagacggtgtccaaactggaagatgagcttcaggtcaagctgctcaaccgcagtacccgcagcattggtctgacggaagcgggtaaaatttactatcagggctgtcgtcgcatgcttctggaagtgcgggatgttcacgaacagctctacgccttcaacaacacccccatcggcacgctccgcatcgggtgttcttcaactatggcacaaaatgttctcgctgccatgacggcggatatgctgaaagagtaccccgggcttaccgtcaatctggtgacgggtatcccggcgccggatctgattgccgacggcctggacgtggtgatccgcgtcggcgcgctgcaggattccagcctgttctcgcgtcggctgggcagcatgccgatggtcgtctgcgcttcgaagagctatctggcccagtacggtgtgccggagaaacccgccgatctcaccaaccactcgtggctggagtacagcgtgcggcccgacaatgaatttgagctgattgccccggaagggatctccaccaaactgctgccggaggggcggtttgtcactaacgaccccatgaccatttcgcgctggctggtggctggcgccgggatcgcctacgtgccgctgatgtgggtgatcaacgaaattaacagcggcgtgctggagatcctcttcccgcgctaccaatccgatccgcgtccggtgtacgccctgtataccgaaaaagacaagctcccgctgaaagtccaggtgtgcattaactatctgaccgagtattttgtggacgtggcggagctgtttcaggggatgcgcatcggaatcataacgagaaggaagaatgtagtcagaaccaccggcaaatgttttcaaagcaatcagaatatccatagcctggcgagacaaaaataccaagtgtgggttacgccgtttcattcgctccttagggatcgtccacaacgcttcagtaaagttaatttcattccaggttgcattagttaattcgcttttacgtaccatagtcaacaagagaagctttaccgcagcacgaatctgaggcgttgttcctactttttccatgtaccggtacatcaaaccgatctcagccggcgttaatgttcggtctctcggctcaaatcgagcgatacttgcaggccgaaccaaatcagcgggattctcgactttctgccctctttctattgcccatcgatatacctggagcacaatatcacgcgtatgcactgctgttgcaggtgcccctctctccactatcgcatcagtaagcgctcttaagtcttcatgggtaatttctgttagcttttggttgccaaattttccctctaactctcgggcatagactgagcgacgcatatcccgggtggagtcggccatctgatagccacgcagccatttctgagcccaggcaccaaaagtttcagcatctttcgttctcgccttagctcgggctttctctttggccggagactttccatcagtaaccattcgcttcgcttcattgagacgctcacgcgcttcagctaacgttatgcctcctactccgtagcggccaaaggtaatggtttcttgcctgccattgatcgagtagttgtagcgaaaggagattgaccctgcggttgtgacggcaacatagaggccatcacggtcattgactttgtaaagtttatctttgggtttgagattgcgtagcttagtatcagtcagcatgtttcaacctattattcttgtttgataccatgctgaaaaacctctaaataactggagttttatacttataaaacaaatagatataaaaaattaataccatgccccatcaaaaactctcagcatggtatcgggcgtaatccatggcattaccaatgaatcatacccatcaaaataccacggtcaaaccgtgcttggcgttgccagacattgccaaaaatgactaagccaaaaacaaaaaaagtccgcaattacgcggacttaagtatggtttagtgcctgttagtgccagacgtttctggttggggaatcattcccactcaatcgtagccggtggcttaccgctgatgtcatacaccacgcgggaaatgccgttcacttcgttgataatgcggttagacacgcggcccaggaagtcatacggcaggtgcgcccagtgcgcggtcatgaagtcgatggtttccaccgcacgcagggaaacaacccagtcgtacttacggccatcgcccattacgccaacggagcgaaccggcaggaacacggtaaacgcctggcttaccttgttgtacaggtcagctttgtgcagctcttcgatgaagatcgcgtccgcgcgacgcagcaggtcgcagtactctttcttcacttcacccagcacgcgcacgcccagacccggacccgggaatgggtgacggtagagcatgtcgtacggcagaccgagttccagaccgatcttacgcacttcgtctttgaacagctcgcgcagcggttcaaccagacccatcttcatctctttcggcaggccgcccacgttgtggtgagatttgatgacgtgtgctttaccggtggcggaagccgcagactcgatcacgtccggatagatggtaccctgcgccagccacttcacgtcgtccagcttcagcgcttcttcgtcgaacacttcaacgaacacgcggccgatgatcttacgtttcgcttccggatcgttctcgcctttcagcgcgtccaggaagcgctgctcgccttccacgtgaacgatgttcagaccgaagtggtcgccgaacatgtccataacctgctgggcttcgttcaggcgcagcaggccgttgtccacgaagacgcaggtcaggtttttgccgatggcgcggtgcagcagcatcgcggtcacggaggagtccacgccgccggagaggccaaggatcactttgtcatcgccaacctgctggcggatacgctcaacggcgtcgtcgatgatttttgccggggtccacagggcttcacactggcagatgtcgcgcacgaagcgctccagcatgcgcataccctgacgggtgtgggtcacttccgggtggaactgcacgccgtagaagcgtttttcttcgttcgccatgatggcaaacgggcagctctcggtgctggcaacggtcacgaagtcagacgggatagcggtgactttgtcgccgtggctcatccacacgtccagcagcggtttgccgtctgcggtcagggagtcttcgataccgcgcaccagcgcgctgtcgttaaccacttcaacctgcgcatagccgaactcgcgctcgctggagccttctacgtggccgcccagctgcatggccatggtctgcataccgtagcaaacgccgaataccggcacgccagcttcgaatacgtactgcggcgcgcgcgggctgttctcttcggtggtgctttccgggccgccggacaggatgatgccgcttggattgaattcgcgaatctgtgcttccgtgacatcccacgcccacagttcacagtaaacgcccagttcacgcacgcgacgcgccaccagctgagtgtactgagaaccaaagtccaggatgagaatgcgatgtttatgaatgttttccgtcattgacgctaattccgaggcaagtgaaacaaaaacagagcgcccggcagaagccgggcgcggaaattaatcaggagcccagacggtagttcggggactctttggtgatcgtcacgtcgtgaacgtggctctcctggatacccgcaccgctgatgcgtacgaattccgctttagtacgcagcaggtcaatggtaccacagccggtcagacccatacaggagcgcaggccgcccatctgctggtgaatgatctctttcagacggcctttataggcaacgcgaccttcgataccttccggcaccagtttgtctgcggcgttatcggtctggaagtaacggtcagaggaacctttggacatcgcgcccagggagcccataccgcggtaagatttgtaagaacggccctggtagagttcgatttcacccggggattcttcggtaccggccagcatggagcctaccatcaccgccgctgcgcccgcagcgatcgctttcgcgatgtcgccagagaagcggataccgccgtcagcaataactggaataccggtgccttccagcgcttcaaccgcgtcagacaccgcggtgatctgcggaacgcccacgccggtcacgatacgcgtggtacagatagagccaggaccgatacccactttcaccgcgctgcagccagcgtcagccagcgcgcgagcgcctgcgccagtggctacgttaccgccgatgatctgcaggtcagggtatttggcacgggtatcacggatacgctgcagaacgccttcagagtggccgtgagaggagtcaatcagcaggacgtcaacgcccgcggcaaccagcgcgtcaacgcgctcttcgttaccggcacctgcgccaaccgcagcgccaacgcgcagacggccatgctcgtctttacaggcgttaggcttacgttctgctttctggaaatctttaacggtgatcatgccgcgcaggtggaagttgctgtcaacaaccagcgctttttcaacgcgtttttcgtgcatttttgccagcaccacgtcgcgggtttcaccttcgcgaacggtaaccagacgctcttttggcgtcatgtacacgctgacaggctggttcaggtcagtcacgaaacgcacgtcacgaccggtaataataccgaccagctcgttctcttcggtcaccaccgggtaaccggcaaagccgttacgctcggtcagggctttcacttcatgcagggtggtggttggcagaacagtctgtggatcggacacgatgccggattcatgtttcttcacgcggcgaacttcttccgcctgacgttcgatagacatgtttttgtgaataaagccaatgccaccttcctgtgccaaggcaatagccaggcgcgcttcagtcacggtgtccattgccgcagagagcataggaatgttcaggcgaatggttttcgtcaactgcgtgctgagatcggcagtattcggcagaacggtggaatgagcgggaacgaggaggacgtcgtcaaacgtcagtgcttctttagcgatacgtagcatgggcaatatctctgacctgggtggttaaatattgccgtggcattatacagagcgtaaccgattgcatctacacttttttataaaaaagcttgcgattgcctctcagcaggttactatcgactgaataacttgctgatttagaatttgatcccgctcacatgttatcctctcaatccccctcaatttataccgtcagccgccttaatcagacggtgcgtttgctgcttgagcaggaaatggggcaggtctggatcagcggtgaaatctctaacttcacgcagccctcctccggccactggtactttacgctaaaagacgataccgcccaggtgcgctgtgcgatgttccgcaacagcaaccgccgcgtgacgttccgtccacagcacggccagcaggttctggtgcgcgccaatatcaccctctatgagccgcgcggtgattatcagattatcgtcgagagcatgcagcctgcgggcgaaggcctgctgcagcagaagtacgaacagttaaaggctaagctctcggaagagggacttttcgaccagcagttcaaaaagccgctgccctcccctgcccactgcgtgggggtcatcacctcgaaaaccggtgcggcactgcacgatattttgcacgttctgaagcgtcgcgacccttccttgcccgtcattatctacccgaccgccgtgcagggtgacgatgcgccggggcagattgtgcgcgccatagcgctggcgaacgcgcgtcaggagtgcgacgtcttaatcgtcggacgcggcggcggctcgctggaagacttgtggagctttaacgacgagcgcgtggcgcgggcaatctttgccagccttatccccgtggtgagcgccgtcggccacgaaacggacgtgacgatcgccgattttgtcgcggatctccgcgcgccgacgccgtccgcggcggcggaagtggtcagccgcaaccagctggagctgctgcgtcagatccagagcggccagcagcgtctggagatggcgatggactactacctcgccaaccggacccggcgctttacccagcttcatcaccgtctacagcagcagcacccgcagctgcgcctggcgcgtcagcagaccgtgctggagcgactgcgccagcgcatgaacgtggcggtggacacgcagatcaagcgcgcggtgtcgcgccagcagcgcgtgacgcagcgtctgaaccagcagaacccgcagccgaaaatttatcgtgcgcaaacgcggattcagcagcttgagtaccgtctggcggaaactctccgtgcgcgactgagcgccacccgggaacgctttggcaatgcggtgacccaccttgaagcggtcagccctctctccacgctggcgcgcggctatagcgtgacgacggcaacggacggcaaggtgctcaagcaaaccaaacaggtgagtaccggcgatgtgctgacgacgcgtctgtcagacggctgggtagaaagcgaagtgaaatcaattaaaccggtgaaaaagacgcgtcagcgtaaaaccggataattcttcgccggttacttactatactgctgctattcccttttttaataaggagagcagcatgccccatcttcatagcgttattcccccgtatattcttcgtcgtattatcgaaagcggttccgaaccgcagcagcgctgtgcccgtcagaccttaacccacgtccagacgctgatggcccatatgccgggcaaacccgccgcgccgcacgtgaataaagccggacagctggagcgtgatatctacgacgcgaagcagacccaggagctacctggtacgcaggtgcgttatgaaggtcagccgtcgaacggcgatgtggcggtagacgaagcgtacgagtatttgggtattacccatgatttcttctggaaggaatatcagcgcgattcgctcgataacaaagggcttattttaaccggcaccgttcactacggtcgggaatatcagaacgccttctggaacggtcagcagatggtatttggcgacggcgacggggaaatatttaaccgctttaccatcgccatagacgtcgtggcgcatgagctgagccacggcgtgaccgaggctgaagccgggcttatctactttgagcagtccggcgcgctgaacgagtcgctgtcggacgtgtttggctcgctggtgaagcagtaccatctgaagcaaaccgccgataaagcggactggctgattggtgaagggctgctggcaaaaggcatcaacggcaaatggctgcgctcgatgtctgaaccgggcaccgcctacaacgatccgctgctcggcaaagacccgcagcctgcacacatgaaggatttcatcaaaacgcgtgaggataacggcggcgtgcacttgaactccggcatccccaaccgggcattttatctggccgcgacggcgattggcggctatgcctgggaaaaagcgggttatgcctggtacgacacggtttgcgatcgcaatctggcgcaggatgcagattttgaggccttcgcaaaactgacggtagcacacggagaaaaacgctccggcggtgacgttggggcggccataaaacaagcctgggaacaggtgggagtgttgtaaatgcaggttccggaactgacggatgacgccgtggttgagctggcccgggaaggcggcgtcgcttatattcccaagctgagcggccagcgcaccatcgcgctctcctcgctcaatgaggcgcagcgccagcgcctggtcagcatcctggagcaggcctttccgcgcggtcagccgccgggacaggcctcgtcacccggcagcggcgaccagcgctatttccgcatccagatcatctggaccgggcaaaatcaggcgcactacgccgatatcatcgtgctggtgccggagcaggaagcacccgagtcgctggtcgagctgtggaagaaaggcgaaggctgcgtgtgcgattaaccttcggtccgaacaaactccacgcgttttttagagataagaccgtggccgttctggcagaagtagtccaccgccccgcaggcttttaagacctggagtggctgatggcactccgggcagcgggcttcaagcgcaatatccttattacagttctcgcagtgtgccaccccgttcaggggctcaagcggtgcctggcaatccgggcaggtaatcgtcatggtgactccttaaaagcattctggtctgcgatcattttaccacgtcgcgttcagtgcgggccacgcagctgttgctgcaaggtcagcagcagctcaacttcctcgattcggcgacgcgtcgtgcggctcacctcgtgcggatcccgttcaacaagactgttggtgcccataatgggcccggcaagacagtgctcgtagagtgtcccgggaatatgccagcgctgaatgttctcaccctcaatcagctcaagcacatcctccgcaccgcgccggtcgtagctaatgatgcgcccgtcgcgcaaccagagccgtaatcctttttgcccgcccgcgggtcccgcgtatttgttaagccagatatccaccggcacgccgctgatgcggccctgaagatgcgcctcgccctccgccgtggtcaggtcgccttttgcgatagcgcggcccaggcggtctttagccgtgaccacctgcaacgtcatctcatcacttccgcccagataacgcaccgtttcgcgcagcatcgccagcacgtgcgtaccgatatccaggattacgccgtccgggtggcgaagcgtacgcgcgtccggctcgccggtagcaaagttaagcgcgatgggttcccctgcggcgttaactccgctcggctcctgcaaaaagccgtcgattttgacgatgtcagagacgctgccaaccagtgaccgctttaccgtttcgatgcgcgccatccagtgatcgagcgccagcacgcgggaagcagcgtcggggtttgccagcagcgcgttgagcttttcgatttggggaagcgtggcgacgatcggtttttcaatcacaatccgcggaacggccgaggctatggcctgttccagcacctcgaggtggtgcagcgatgcggtggtaataaagagagtatcaagcggtacggcgagaaggtccgtaaacgaagcgcagcgcgtgacgccttcaggctgcctggtggggagaacatcaaatccaaaacaatgaaccgcgtgaccataaaggcgacgtaaggcgggcagatacgcggtttccacgaccgcaccaagaccgacaaatcctaactgcatagtttcacctcagggaatcgatgccggggcataacgccgccccggcatgctgaggtttatgaggcgttagcagccggtttagtctgcgcattttccagcatgcggcgtaccggaacaatgaggacgatcagtaccgcggcacaaatcagcagcgcgacggagcagcgcgcaaagagatccggcagcatatccagctggtcggccttcacgtggccgccaatcagacccgccgccaggttacccagcgcgctcgcacagaaccacagccccatcatctggccgcgcattctctccggcgccagcagcgtcatggtcgccaggccaatcgggctgagacacagctcgccgagcgtcagcatcaggatactgcccaccagccagaacggcgatacgcccgccccaccgctgctcagcacgttctgtgccgccagcatcatcaggccaaagcccgctgcggcacacaggataccgataacaaacttggtgatgctgctcggacgaatgttcatgctcgccagcttcggccacgcccagctgaacaccggtgccagcaggatgatgaacagggcgttgattgactggaaccacaccgccgggatttcgaaatcgccgatcatgcggttagtgtagtcgttggcaaacaggttgaacgaggttggcttctgctcgaacgcggaccagaagaacgccgcggagatcagcagaataaagcagaccagcagtctggcgcgctctttacggttcagtcctgcaaaaacaaacagataaataaagtagagggcaacggatgccgcaatcacgtaaaccagcacgctggctaccgcgaccgggttaatcacaatcacgccctgcgcaatcagcgtcacgatcgttgccacacctgccgccagcgccagcagccaggcgcccacgccgttacgcttcaccaccgggctgttccaggtggagtcgagaccgacttcgccgtcatagcgtttcattgccggaacggcaaacacgcggaagataatcagcgccaccagcatcccgataccgccaatgccaaagccccagtgccagccgtgggttttgatcagccagccggaaatcagcggggcaatgaacgagcccatgttgatgcccatatagaacagcgagaaaccgccgtcacggcgcgcgtcgccttttttatacagggtaccgaccattaccgagatacaggtcttaaacaacccggagccgagcacgatgaacatcaggccgataaagaacaggttattgcccatgatggccgagagcgcaatcgacaggtgaccgagcgcaatcaggatcgaaccgtaccagacggctctctgctggccgagccagttatccgccagccagccgcccggcagcgcggccaggtacatggtaccggcaaagataccgacaatcgccgaggcgttttcacgcgccaggcccatcccgccgtcatagacggtggcggccataaacaggatcagtaacggacgaatgccgtaaaacgagaaacgctcccacatctcggtgaagaacagggaaccgagcggatacggatggccgaagaacgttcggctttctttttgattaacagaggattgcataattctcccgaaaggtatgtcgtcgtgcttgtaaacaccagcaggtacgccggccagttacgtatctggccgattttttacatgcggcgaaaagttggttaaccatttgataaccaggcgctagttttgtctagtaccggaccctggactttaagatgaaaattcgacgattgtctactttcttagatttaaacttggttaaaagtgaatagtgattgacttcacacagagaaaaccggcggtatgaatgggcaaaaaaaagcccgcgagagtcgcgggctttcgtgcgttcagcaaagcttatttgcttttcttaatgtgaaagacaaataaaataccaataacattgattttaaatgtttttataattcgctatataaaaatgggtacaaccttgtgtacaacaaaaatcaaagtgctctgctttttagctcactttttgaactacgaaaattttgcagtttctccgatcccttgccgtaatcttgccgtgctatcgaaacctcaccgtatccttaccgtgatagccattttcttattgtatgatacttctatcccacaataaggaatcagccagccatgagaatgaccaaccgcaaaaaagagatactcagctactttgaacctgatagcctcgattgggttactggtgagattggtgcgccgccgttcgatgtgtcgggcgtggcctaccttcttcatggcatggcgtcgttcgataagcgccaccagctcgaatcaacccggcgaactcttgaaagtatggttgctggtgggttgcttgagcgtgtgacggtgtatgagtctcgtcaggtacggcgcggcggtgagactaacgcaacggtcgtgcgttacggtttacccggtcattgtgctgttatgcgcgatactggcggcgctgataacgcaatatcaggtgaatacatgcgggtcagttaatagcctgcaatctgtcgttgatgcggctcaggtcgtaaacccggcgttcaatatccagcatcaggaaattgtggatctcggcctgctcaggattatcagactctctggcctgtaatagcaattcattgtaaccatgcaagccgcctgagttttccgccggggtggtgcctttcccacgcaggcagctaatgggctgattactcgtatcgtgtgtttgcttctccagcacaatgacgcaatcccaccagtcgccaaagtcatacgtgtaaaccagcttgtcaccatcattctggagcgctgcccatagtggtgtgattgccgcattacccatgctttcatcctcaccccatacgcgatactcgctaccgggatcacctttacgccctttctcgaacatatacaggtgttcgtcattccagccaaaagccaactggatcaccgcgtgaagttcactaaaggggatttgctctggaaccagcacacgccgccatataggtggtttgctgtctcggatggttatctttagctggtacatgcaaatcctgaataaatgcgaatcggaaggataacgatactgacgcactcacaattctgtaaaggtgaataaaggaaatttgcttaatacgcataagttacatgcggaataatcccgtatctacctgcgcggcgctggcttcctccactggtaggcaggcgctcgcatcatctccccgaaccgtttgcgccgggctgtatcagcttcaataatgcgctccatttcccgaacctctgccggggtaagctggtggccttcatgctccagtttagcggctgtgattgcggctatctggcgtggggtcatttcacctttcctttgaaggtagcaatttagctactgcttgcattggtgtaagagccaccatcgtatcactcagggaactgtagcaattctgcttggtacaagcggattacaatattgatctgcccatgatgaactatctttttatcagtaaccttttcccatagggatggaatatccatatcatggcctgaaagaagcaatttagcggcatcaactgcatatcgcttattctttgcccctcgttttaagccataactatttgctggaatcccttttaccatcccttctgaacatagtccgatgaatgctacttttgggcatccttcatcataaacactcaatgtgttgatggcattgccccatgccgaacgaatgtctgggctatccttcccagagcaatcggtaacaaccattaaagcggcttccgcgtatttattcatggatgactccaaagattaatatttctatccagatgataacaggttgtaaatcgcttaggctcacatcgcctcacgctacaagtggcggcgtaacccttagtgtaaccttagggcaatcccggcaaatccttaccattgttacccgcacaaactggcgtaatgatgcttgtcgctgggtcgctgggtcgctgttttgcgtactaattaccgcaaccctgaatattttagacggcttacaccacgatttggcttccagcccactactggcgcgggtctcgcctcatatgggctttggttctgtcctgaacagtccagtatttcaacatcggtgactatgcggattgctaacatgcgccgctttttttaacccttcgcagatcccgccttgcttgcattgaaacggatctcgctaatctcagctcaagccgtgcgattctgtcggcatgtagccccatgagtccgttaatcaatgtcatctcgcgccattcttctgtttccggcgtcggattattcgccagtaatagcccgtatctctcagccagcatgaggtttcttgcacgatttcgcaccagcggagaaagcgcctctcccccctcaaatgggaagaatgcccgccgactgcgttcgccatgtttgacggcattagtattgcccaacggtgcgcctgcgcctttccgcttgccaccccatccctatcttgattgttggcttttttttttcatttaacggctcactgtgcgcatttttgtgcgcaaaaaccttaacaaaccctaacaataccttaataaaactgtatatctaacttccgccatctactgcgaacggatagcgcccaagccagcaataacaggcatctccgctatttttcgaatgagcaattcgcgcttagaaattactgcgaattcgcagttagcattcgtcaggtagtacgcacgttgaatacgcagttttgctgcgcacctggctgcgtactgcgtaccagtggaacgaaccagatatttgggacgtcctgaatcaggatttggcttccagcccactactggcgcgggtctggcgctgctagggtttaaaatatgtactaaacagtactaaattttccgccgttttggtgcgcacctgactgcgaaccatcgcccccgctggtggtctacctttgcctcttgccgccatttaaccggaaggcgttaccgttcggttgcgctatccccatgcggtgttgcgtttcggtaacagctttatgcaggtcgccaaagtcctcaaccttcacgggcgggcgcttcacgttctccagacacgtttcacggccgcgctttatccattcccgatcatcgtcctcggtgcataacagcatgacttccaaccatcgcgcggcggcgcgtcggtacagcccttttgcttccagatcctcggctttactgtcgtttaccatgtgtatccccctcagaatggatcttcatcatcaaacggcgggcgctggtcaaaatcatcaggggtgttatataactcccatcccggcgcggattgtgttgcgtggcctctgctggctccgcttgctttgactgattcggcccgcttcccgccggggcgtaccgttctggcgctgatcacactgtcggctactacctgataaccttgctgtgtaccgccatccttgcccgtccactgattgacctgcatcgctccggcaacactgaccaaatcgcctttaacgtgtcctgccagtgcgtcggcctgtttgccgaatgccaccacgcccagccagaaagtaacctcaccgccctctgctgcatggcagggcagtgccaccgctaaccgtcccattgccatgcttgtaccgtttgctgtggtgcgggtctgcgggtctgcgactaaacgcccgtaggctgatatctgtgctgtcattttgcgaatacctcgaattattagttttgctaatgaagattacccggctccgtcttattgtgggacacctgccgattttttttatagtaagcgaaaatagtgttgtctcagttgtctttgttgtctcatggctctacaggccgcgccacgcctgggttttgctgagacaacatttgcaatttagtgttgtctcaccctgagtaaatgttgtctcactgcctgccagattaaaaaacacacgttcgtaatgttgtctcaaaatggctaaatgttgtctcaatgttgtctcaatgttgtctcagaaattaaaataaaatccttataaatcaatgtaacttacaaaatgagacaacaaagacaactgagacaacactaaaactacgcatgtgaagaaatattattcttctggctggctgctttcctccgccatgaaattgagtacatagacgcgaatctgtcgcccatcctcccttactcgcccctgatagcctcgcccgctcgttggtggtgtaagcattcctgcattctttagaacttcggcaaactgtttggtattgaagccctttgcaatctcctgctcaaacgctgccgggaaggtgtagaaaattatcgggtcgccgtcgtggttccccttcttcctgtacccggctaaatcacggatgggtaaatcgcgcgggtcataacccagcggcgcgaatcgactcagcccataggcatttaaaaacgcctccgtctgctcgatgatctgctggtgctctttgttccccgtgccgaactctttcagccacgcattgtagctgtgctgtatcgcatcccgacacgtttgagcatcccagccagtaaccacgccacccagtagtaaagcggcctccagaatggcgaacctcgcccctacacggtgaacctgttccccatagtcggcaggaataagactgcgccagcgggcttcacagtcacgaacggtatcaatggcctgctgctggtggcctgcaagccatctgacccactcccgcccggcagcgcagtgattgctctgccacgcggattttaatgcgtctgcatggtctttccctgtctggtgctcatgaaagcgcaccgccttacttaacgggatattcagcagacgcaccagttgccccgcttttgtcttgcgtcctgcggtggcaatgaacgtttctaaatccatttccccggtgctgattgccacggtacgccagcgttttagatcccggtttccgccttctttcgcgccctgcaatttccccacgccgttaaacagggcataggcagactgagaaacgcttatcgggtctgcgccctgtccgacttcatccagcggcatcagtccgtcattgtgggcggcggcctcgtttatcagccccagcgccgtcccgtaccacgtcaggcgcaaggcatcagggttcccgtatagactgctagccacgttctgcgtggttgttttcccggcgctcgattgctcatagaagtggatcccgaatccgtcacgctctgccacgccgattaatggcgctgccagtgctgcggcaatgcctgtcatcatcgcgtagttgccgtatgccagccgtgcgacactgttgcgccagctttccgacgttcctgctacggtatacccggcagcggctgaactgcgcccgctgaacaaaacaggccgctcaggtgtgccgatgatttccccgtccggcatgatgtatgccccgcactgccagcctgtagcatgagcaacgcgccacaattcacgcgagccgctccgctgtagccagtctgcaagaatcgcccgtaggctgtttttcgtggtgacgttgacgccaccagctttcagagtgcgccagccttcacgctcgccaatatcagccagcgggatagccgctgttgtcggtatgtctgcaccgaatgccagccatgagataataagatactgatctttgtcgtcgcgtcccgtgccgataacctccagcggtgaacataaccagctttcagcgttgatgatctccccgctttccttgtccaccttcggcgttacccagaaaacgccatctttgcggctctcaatgtggggttttagtgggtctttctctgggtggtcagttttaccgccctcaatggcctgcaattgtggtttcacggcttccccttgaatctgatacagcgaatcactaaatgcggctgtagcggcttccagcccgttttgctggcggtagtcgtcccagtcggctttatggtctgtcggcggcagcgccacccagccagccacggataaagctgctttctctgcggcctccttcccgatgttggtggctccggtttcggaggctgctgtagggtggtcgttatctgcggcgataataatttgcgactgcgggtatttccggcgcattactccggcaacgtggatcaggttcccggcgtccattgccgccagtgtgagcgcctccgggcgcatcaggtgaacagaaagagcggtagccagcccctcggcaattaatacgctctgcggctgttctggtgcgtttacggcgtgatatgccccgcgcttcgctgaacctgtcagaagtcgtttctctccctgcggtgtaatggtctgcgctgctgccactgcgccggattcgtccaccagctccagcaataacgaaccatccggcataaccggatagttaaacccggtcagcccttttgattgcaggtactcagattcgccccgtgtgacgctctggcgcattccggcatacagacgggcaaacgtagcccttcgctgctctgcgtcctctgctgcctgtttctggcgctcctgctcatgccgctggcggtcagcttccagttgcccccttctctggctggctgctttcctgtctgtttccgtctgccggtaatcaatacccagcacatcagcggcaagctgtgccgcctccgtggtgtcgcagttgttcaccttcttaatcaggtctaagccatcgcccgcgccgcactgattgcagataaagctaccgcgcccgttgtcgtcgaatctgaaacggtcttttccaccgcacgcagggcagggggcatgacggcgtgatgaatcaggaacgtcgatagacaggccagccagcacattaggccatttaccagcggcggcgctggtcacttcgcggataatgtcgatattacgcattgtgtcgctccctcagtgcgccgctggcatttcaggcaagccgttttcattcaggtcagcaatgaatccatcatgcagctctgccagcgtttcacgtccgaacggggtcagctcgccgcgctccgtgtcgatcatggcctgataaaaaacaatggcgttcgccgttccctgctcaatgccgtagcgctcaatcattgcgccctccatgttgttagccatcgccagacgttccgcgaacgggtaaaccacaatccccgccgtgccattggagtaaatcgctacttttgacgttgtgccgtcagcctccgtgacggtggctgtgccgttctcgcgcttcatctcagaaacgaacgtcgcagcaatcagccagcgccacataatgacgttatgctgcgcggtgaagtcgaaccagccacgcgccccgccgtcagccactgcaaaatgcagggcaaatccttcatccgggatttcgtcatacctgccgctatcgagatgagttaccgcgtctgaatagggaacaaggcaaacatgctcatacatcccggcatcattgcgggtcatgatgtttacgccgtgcggtgtggcttctgcgtggaacaggtcgggatttcccggtttaatggtcagtatattgctcatgctttgccctcccgatattcacgcattacatggtcagctagcttgctttcagcctcgctcattgcttcgggcacaccgtgtaacagcgtcagaatggaacctataaggcgtggtaaatcgggatctgttttattggtggcgctctccagccacatggacaaaacagcctgtgcctgttcaatctgacaggcggcatcaatcagttgtaactggctcatactgccacctccagacggatacgaccggcaaagaaacagacgtgatcccgcgccagtgaacggcgggcttcctgctcagtttcagcagcaatgtgatggattttggcggtaattgtcggcatgtcgcggcgaacggctgcgattaaccagataaattgcggattttgggtaggggtagtagccagcatagcggcagcctctgattcatggtcttgataaccaccaccggaaacgccaatttcgctggtggtgaactgtacagggttggcgtaaccgggaatcagagaaaccggcgcggattgctccgcccccatacagtccaccattgaaggggtgtaactgcgcggcacaaaaaaacacgcatggcgcgtgttgtgcgctctgataattaccgggacgccaatcccggcaccagatttggctggtgcgctataaccataaaccgggttggcgatagtcggcaagcccttttttatggactcaagaaactcaccttcgcgcgtgcgcgtactgttgcataaattccctgcatctagtggtgatgtcagaaaaatcttcccgcctcgtgtagtgatgatggaaaaatcttcctcgcgtagtgacccccaattaatcttcgtgcgcgtactggtctcgaaactctcctcgtcaccacgacgagaaaatgaggagctggcattagctggcactgttatgccagctttaccctcatgcgcgtgcgcgatcccgcgcaaggtacacatcaggccagccaggggaaaggctttattctggacggcgggcattagtgaacctccggcaattgaggctgatatttgcgccataactcagcttcttcggcgatcaggcgggacttctcacctttgcaggcttgcaggtctttaccgcgcttgctggccttcttgtcgtaagctgctttgcgtttgctgtggtcgttcaggaaggcgaacggcacaccataggagccagttttacgaatagacgggataacctcgcggaatacccagttagtgaaacgatgtgcgaacgttccggcagtggtggccttgcggctgcgggcgatcagtttgtagaagccagactctgaaactgtccgcatgttctgattacctccgggggtataagttaaacttacccccttttcatcgtcatcaagcgcggcaattgccatgctgtgattagatagctccagcgcctcgcaaacgtctttggcaataaaccacggattaccgtcacaattcacaatgcggactttcttaccctcaaaccggataacggaaatatcgctttcagtaacggcaagaatatccttctggcaggcgttggattgtggggcggcctccgaattgaatcggcttttttcgatagtcatgttttcggctccgttatgcggcggtgagattgtccgggtatagattgagaatgtccgcgatatcctgcttagaaagcccgttatagccaccagcggtggcgttgtggttcacaagctgaataacttttagaacgtcaccgcgcccggtaaagcgatagcgtaaatgtgacccgatcccgtcgggattcttttcgtcaatacgctcaatctgaatatcaagtctgcgctctaactcgcgggcgcggtgcttcttcggtgcgcggcgtggcgcttgtgtggtgggcgctggtggcgtaacatcagatccgcgaatatctatgttgttagccgcctgctgtccggggcggtttttcttttccattacgccacctttccccggcgctcagccagccagttattaatctctaccgcatcaaaggcggtcacgttatcggtgagttttaccgggcgcggcagagtaccgttcttaacccagcggtcaatagttggcatggaaacacccaaaagttccggcatacgaaaacggcggatgtatccagtagtgggaagtgctgattgtgcggcttgagaggctgtcatatgtcccgtaactcctatgatagctggtgttacgggcatttaaggcaaaaaagaccctgctgtgaattacactaaatttaatatcatgatgctaatttttagtatctgactacttgggctttcctgctgtagtgcgatccatgggcttgcgattcatatctgagattatttttttagatagtcgatagacggctcggaataacctgcaccaacagatagccaatgatttattgttgcgttagcccaagcatcatttgtgtctataccgttaatatttttacattcatcaggaaaggtattgcgtgtgtatataagagccatcagacagttctctctattctgactaaatcttttagtattcccatgctcttgtatttcattcactgtattaacagtgttttttagaggggaatgatatcttggggttatagctgtgcaattatctatacaatctctaacacgcagaaaccaaccccttgaaatgtaaatactatcaagagtgatcacttcttcatcttgatgcattatttctgtctttatttcttcagggttgctgaaaatatcgctaggtaaatcaaatttgtgagcttctcctaaaaggattgactcaacggtatctgaattgtcgtaatcaacacaatcatgcgaagcggtaagtaacgggccaatctttgaagatccataacgtaatactccatttattgtgccactgttaagatgccaaatcccagatgctaagccagtgttatacctaactccgtggagttctttttcttgaccgtcatagagcactgggtcgataagataaaagtgtgagtttttgaggcaattagtatcttgtattactttatcttgtgcccaggcttccttattgataaatccggccaaaacgcaaggtataccatctaagatcacacctaagtgaattgctccagatgcccccataagcaataagtcattggtttcaatttccagtaactctgaggctctgacgatatggaaataagtgtttggaggaatttttttcatttactcatccattttttaattgaagtgacgttgtaatcttcgccatgttccagcgctaccagcaaatcacaccacaacgtgagcgctgcttttcgctcatcgaaatactggtgacggttatagataccctccacgcctttaattttgtggttcaggcatcgctcagctatcacggggtcaatccccagcgctgccatttgagtacgcatcgtgcggcgcagatcgtgaatactgaatggctcaacgtccggcatttctttcaggacggcgggcataaccatattcagggtggcgcggctgacatgcgatgtcgttctggctcgtctggctggaattagccagcggctgtctccggcaaagagcctgatttcttcgatccactcgattaccggctgcggtaggggaatgtcgatatcatccccattctttgcacgggttcccggcaggtgccagacggcatttttcaaatcaaactcatcccattctgcggcgcatagctccatctttctgacgcccagcgcaagaatgattttaaaagtaagctcgttttccctgcttatcccgcgcccacggcgtagcgctttaaagaactggattaattcatcgcgtgataaggcgcgttttcgcccctgctccttgcccccggcatccttcgagccaaaggatatagcggggttcacctcaatcattccgcgcaccacagcgtaatcaaacaggcgctttagcattctcaatacatcattagcgactgtgggagatccgcgctgtagcacgtcctgcaaaatgctatcaatatgacgcgggcgcacgtcctcgacgttcatcttgccaattagcgccacgatgtttttttgtaggctgctgcggaaaaggtcagggtgtttgtaatttggttctatctggcgggtgtaatactcagcggcaagcgccgaaacgttaatggcgttcttctcagcctcgatctttgccatagcatcggcttttcgctgctgcttctctgctgccacgtcataacccagcgcaacgcgtgctgaaagctcccttgctatctcccttgctttagacaaagggaagtcagagtaagagccaatcagcatagttctggacttacctgccatttgatagcggtagcgccaaaaaggggttttatcctctttacgaaacctcagatacagcccgtcaccgtcagcacgtccctcgaacctttccccgctcttaacccaagcgcgaatttgcatatctgtaagttttggcatgtgcgaatacccgtgaaacaagctcattccgtcatgggtacaaagcttttgcacccaaaaaccaccacacttgtacccagaaaagccgtatatcaaaccgggtacaaccttgtgtacaacattatcatgcactctgatgcgtcgttatgatagcccctgataacaaaaaagcccggcatatgcgggctttatggatttcatgctggtgggtgaatcgtcctgatagcttatttgcttttcttaatgtgcttaatcagacgcttacgcttgcgcatctggtttggcgtcagggtgttgcgcttgttggcgaacgggttttccccttccttgaactggatacggataggcgtgcccatcacgtccagcgatttacggaagtagttcatcagatagcgcttgtaggaatccggcaggtctttcacctggttgccgtgaatcaccacgattggcgggttataaccaccggcgtgggcgtatttcagcttcacgcgacggccgcgcaccagcggcggctgatggtcttccgcagccatattcatgatacgggtcagcatggcggtgctctgacgacgggtggagctgtcgtaagcttcgcgcacggattcgaacaggttacccacgccgctgccgtggagcgcagagatgaagtgtacgcgagcaaagtcgataaagcccagacggaagtcgagggtctctttcacctgctcacgcacttcattgctcaggccatcccatttgttgaccacgataaccagtgagcgcccactattgaggataaagccgagcagagagaggtcctgatcggagatcccttcgcgcgcgtcgataaccagcagcacgacgttggcatcttcaatagcctgcagggttttgataacggagaatttttccaccacatcggtgattttcccgcgcttacgcaccccggcggtgtcgatgaggacatactcacgctcatcgcgctgcatcgggatgtagatactgtcgcgggtggtgcccggcatatcgtaaacgaccacgcgctcttcacccagaatacggttagtaagtgtagacttacctacgtttggacggcccacgatggccagcttgatcggcagatcctgcgggttgaagtcgtcttcaggctcttcttcttcgcccgcttcgccgtcttcaaactgcgcccagtattccgcgtcttcgtccacctcttccggcgggttcacttcgtcaacccacggcagcagaacggtttccagcaggctggtgacgccacggccatgcgatgccgcgataggatagatttcacccagacccagtgaccagaaatctgcgatagcctgatcggcatcgatgccgtcggttttgttcgccaccaggaaggttggcttttcgcgtgaacgcaggtgtttagcgatagcggagtccgccggcatcaggccagcacgcgcgtccaccatgaacagcaccacgtccgcttcttcaatcgccagcagagactgttccgccatgcgggtttccacgccgtcttctgtgccgtcaataccaccggtatcaatacagatgaactcgcgtccttccacctctgcacgaccgtacttacggtcacgcgtcagccccgggaaatccgcaaccagcgcatcacgggtgcgtgttaaacggttaaaaagagtggattttccaacgttagggcgcccgacaagcgcgaccacaggtaccatgtttgaagcctcataaaattcaaaataacgtcgctttcgcggcgtttttaaaaatgtcaaaacggctcctgagtgaacaggagccgtttagtatactacaaccgccgggtaattaacgcgtgatcgcgtacagcgtgccgtcttttgcctgaatcagcagtttgccgtcggccacaaccgggtcggtcaggaaaccggagctgtcgactttttgctgcgcaacaaagcggccattatccggatcgatccagtgcatatacccttcgctgtcgccgacaaccaggctaccgttgtacagcgctggcgcagtcagcagacggtgcagcaggtcgctttgcgtccacagcgtcacgccgccttcggtgctcagggccagcagacggtcgttctggtcaaccatatagatgcggttaccctcaacgatgaaatcatttaccgagcccagctcacgtttccacatgatctggccgctgcgcagatccagcgcggtcaggttgccgttgtaggccagcgcgtaaaccacaccgttaacgatgaccggcgttgtgtccacgtcgctcagacggtcaatttccgttgagccagtggcctgagagatacgctgctgccagatcatctggccctgctgcatcagcacggcgcttacgcgaccgttgtcgccgccgacaatggcagcaccaaatgcggtagccggggcagattcgccacgcagagagagcgcaggcatatccaggttaacggtccatttcaccaggccgtccgcttcgttcagcgcctgcagctggccgttgctggtatgaatcagcaccaggccatcgctcaccaccggacgagagagggattcccccgccacggtcgtttgccaggcaatggaaccgtcgctgctgttcagggcataaacctgcgctttttcgctgcccacgtagacgtggccaccggcaacggtcaggccgccagacagcagtgcaggcttacgggagaaccagccgtctttttccgccaggttaacggaccacacttcttttccgtcatccgcgttcaccgctttcacggtacctttgcgatcggccgcatagacaacgctgtctgcatacgcaggatgaaggttggaatagaaatcaccaatcccattgcccacggagacatcccacgcggtggatggggtaaactggttttcaaccgtcggcagtggggacattttcacaacgtcttcttcgccactgaacagtgaacaaccactcaataatgtaacagaaagcagtcctggcagaagtaatttacgcaattgcatcgggtccctctcagacggacaaattatttattttcatctgcatcatttcgctcagcgcaggtgaggcattgctctctacgccagcttgccacgctttacgcgcgcccgctttgtcacctttgctcagcagtgcttcaccgcgcagatcggcaacgatggcagcaaagccttcgcctttgatggtatcgagcgttttcagcgcatcgtcagctttcttctgctgaacctgaatacgtgccaggcgcagattgatcaccgctttcagattttcatcactggcggcagcaaggccctgagacagctgagcaacggctttatccagttcgttcttatcaacgtactgctgagccacttccagcgcagccagtgcaccgtaggtgtttttgttgtcagccgcaaatttttctgccgccgtcagcgtttgcggctgatcggcacgaattgcgctcacggtattttcataggacagggacgcgccgcgcgcggaatccgcctgatgattgttccagtaacgccagcctaccagcgcaccgacacctaaaataaccccaacaaccagcgctttgccgttttcagcaaagaagcgtttaatcgcgtcgacctgatcgtgttcgttctcgtaaatttccacgccgtccttctccttagcccaatagagtgcgcaagtgcgccgcaacgccgtcctgcgttaccgttgtctgctcaccagagcgcaggtctttcaccaccacttcgccgttagccacttcggactcacccagcaccagtgcgatacttgcgccccacttatcggcacgagcaaactgttttttgaagttgccgccgccatggttggtcatcagcttaacgcccggcagcgcatcgcgcatgcgttcggcaagctgcattgccgcagactgcgtttccgcgcctgaggccaccaggtatatatcgacaacggaatctgctttaaattccggattaactgcctgaaccagcaaaacaagtcgctcaagacccatcgcgaagccaaccgcaggcgcagcgcgaccgccaagttgctcaaccagaccgtcgtaacggccgcccgcgcacacggtgccctgagagccgaggctggtggtgacccactcaaacacggtacggttgtagtagtccagaccgcgcaccagacgctggtttacggtgtaggcgatgccagccgcttcaagcagcttgcacaggcccgcgaagtgttcgcgagattcttcatccaggtaatcacccagcgcaggcgcatcgttcagcagtgcctgaacatcggcgtttttggaatccagaacgcgcagcgggttgctgtacatgcgacgtttgcagtcttcgtccagcttctctttatgctgttccaggaacgccaccagcgcatcgcggtagttcgcacgcgcttcgagagaaccgatagagttcagctcgagggaaacgtgatcggcgataccgagcgcacgccaccagcgggcggtcagcataatcagttcagcgtcgatgtccgggccctgcaggccaaagacttccacacccagctgattaaactggcgataacgccctttctgaggacgttcgtggcggaacatcgggccgatataccacagacgctgctcctgattgtacagaagaccatgttcgatgccggcgcgtacgcagcccgccgtcccttccggacgcagggtcaggctgtcgccgttgcggtcctcaaaggtgtacatctctttttcaaccacgtcggtcacttcaccgatcgcgcgtttgaataacggggtctgctctacaatcggcaaacgaatttcgctgtaaccgtagctgccgagcacctgcttcagcgtgccttcaatgcgctgccagatggcggtttcgccaggcagataatcgttcatgccgcggatggcttgaatgttttttgccacgtttattctctttctatatacaaaaaaaacccaaagaatgggttcaatcatacatgggaagctcacggcttcccatcacgttatttttcaacctgctgaacgttgatacgctgtgtctcgtccatcatggcggctttggcgcggatgcgggcttcaagctggtcgatcatgtcactattatccagacgatcttttcgaacgccatcttcatagagaccacttttcttgttaccgccggtcacgcccagggttgacaccagggcttcacccggaccgttcaccacgcagccgatgatggagacgtccatcggggtgataatgtcttcaagacgttgctccagggcattcaccgtaccgatcacatcgaactcctgacgtgaacaggttgggcaggcaatgaagttgatcccacgcgcgcgaatacgcagtgatttcaggatatcgaagccgaccttgatctcttcgacaggatccgccgccagcgagacgcgcagggtgtcaccgatcccttcagagagcagcagccccagaccgatcgcggattttaccgagccgctacgcaggccgcccgcttcggtgatcccgaggtgcagaggctgatcgatctgctttgccagcaggcgataagattctacggccaggaacacgtcggacgcttttacgctgactttgaactgatcgaagttaaggcgatcgagatgatcgacgtgacgcatcgcggattcgagcagcgcctgcggcgtaggctcaccgtatttttcctgcagatctttttccagggaaccggcgttaacgccgatacggataggaatatttttatcgcgggcgcagtccacgaccatgcggatacgctcttcgttaccgatgttgcccgggttaatacgcaggcaatcgacgccgtattcggccactttcagtgcgatgcggtagtcgaagtgaatatccgccaccagcggaacgctgacctgctgtttgatcagtttgaacgcctcagccgcatccatggtcgggacggagacgcgaacaatgtccgcgccgacacgttctaatgctttgatttgattgaccgtcgcttccacatcggtggtgcgcgtattggtcatcgactgaacggcgataggtgccccatcgccgattggcacattcccaacgtaaatccgtttcgattttctacgttgaatcggagcctggttatgcatgaaaaatctcccgcgttgcccgtctgttactgtgctgctgattgttcggcattaacggtaagacgtgcaacctggttagttctgataaagcggctcaggtcgacaggttttccttgatactggatctgtaccgctgccggagcgccgattttaagtttataaggcgcctggcccgttaggtttaacgtgccatctttgcgctgcaggccgctgaacagttttttacctgtcgcgtcagtcacttccagccagcagtcggcgctgaagttcattaccagcgcgttagggtcggctgcgggtgtcgccgtacccgccgggctggttggcagagacgctgcggtattgtctgcaggctgagtagccgcaggcgcgttcgccgcagtatcaacattcgcctgagaaggggcaaccaccgcgttttgatcctgagcctgaggcgcagcggtgttagccgttgctgccggagcctgcgcagcattggtcgctgtcgcatctggcactgcggtctgtggctcgctggaagtcgctgcaccgtcggtattcagcggcacgctctgggcgttatccgttccggcctggttgagttcggcggaggattgatcggccatagtggtgatctcttcctgctgcgccttgtggttttgccaccaccacgcaccggtcagaccgaccaccacaaacagcaccagccaggtaaagctcatcagccagccatcacgttttttacgacgtttccccagggagaaggtctgcatcggcgcaacttttgctgcacggaccggcgcctgcttctccatcattggcagtaattcgttttcggggatgtgcaccagttttgcgtaagagcggatataaccgcgcaagaacgttgaagccagatcggcgggtgccttatcttcttcaatatcgcgaaccgtggaaaccttcaggcacaagcgttctgcgacggcttgctggctgagtccgagttgttcacgggcgttgcgaagacgaacgccagtggagagtgcttcatgttggtcgtgagtggcttcagtattcattcgctacaactactggtacgtgaaaaaaagggttcaggcgccggtgagtcacaatgccacccgcaccgcgaaacttctggtcagttaaccttgaacacagagtataagactgtcagcccggagatgacagtacagccctgcccgtacggctaaactgttgttacgtcgttacatactgcccgaaagtcggatgaaacgcaccgtaattattgatcagtcttcacgaatctgactgattattcagtaaggttatgtctcacggcgcagataatgcgccgtgagtgcataataatcaaacagctttaaccgcgatcgtctcgccctgcatgcgtttacgcagggtacgcttggtacggtcaataacatcaccagccagctgtccacatgcggcatcaatatcatcaccacgcgttttacgcacgatggtggtgaaaccatactccatcagcaccttggagaaacggtcgatacggctgttcgagctacggccatacggcgcgcccgggaacgggttccacgggatcaggttgattttacatggcgtatctttcagcagttcagccagctgatgcgcatgttcggtaccgtcgttgacgtggtccagcatcacgtactcgatagtgacgcgaccctggttggcgttggatttctccagatagcgacgtacggcagcgaggaaggtttcgatattgtactttttgttgattggcacaatttcgtcacgaatttcatcgtttggcgcgtgcagggagatcgccagcgcgacgtcaatcatatcgccgagcttgtccagcgcaggcacaacgcctgaggtcgacagcgtgacgcgacgcttggacagaccaaagccgaagtcatccagcatgatttccatcgccggaacgacgttggtcaggttcagcagcggctcacccatccccatcatcaccacgttggtgattgggcgagtgccggtcacttttgccgcgcctacgattttcgcagcacgccagacctggccgataatttctgaaacacgcaggttacggttaaagccttgctgcgcggttgagcagaatttgcactccagcgcacagccaacctgggaggagacgcacagcgtcgcgcggtcttcttccggaatgtagacggtttcaacgcgctgatcgcccaccgcaatcgcccatttgatggtgccatctgcggagcgctgctcttccaccacttccggggcgcggatttcagccacttctttgagcttattgcgcaggaccttgttgatgtcagtcatgtcatcaaaattgtcgctgcagtaatggtacatccacttcatgacctgatcggcacgaaatggcttttcgcccatctctttgaagaactcgcgcatctgctgacggttcagatccagcaggttgatttttccatttttattgggaaccgcaggaatggcgacttcggaggtattcactaattcagacataatatttaccggcctcgttgttacacgttatggcccatggagggttgaatagaaacgccccggaaagcggtctgctcgtccggggcgttgcattgtacaaagtctggcgcagggatgccacgtctggacgcggcatttacgaaaataatgtgtaaacgaaactgttaaattaacgggtacgtggacacacttcgccttctgcgaagaagaaagcgatttcgcgtgcagcagattcaacagagtcagaaccgtgggtaccgttctcggtgaagctgtcagcgtagtcagcgcgcagagtacctgccagcgcgttgtccgggttggttgcgcccagcaggtcgcggtgacgctgtacggcgttttcgccttccagtacggataccacgattggaccggaggtcatgaactcaaccaggccgtcaaagaatgggcgaccttcgtgctcagcgtagaagccgcgcgcctgctcaacggtcaggtgcagcattttggtaccaacaattttgaaccctgcagattcaaagcgagcgaagatgctgccaataacgttttttgccaccgcgtttggtttgatgatggaaaaagtacgttcaatagccatgataacctctgtcaatgttctgttgttttgcatacctgagtatggtgtggcgcggattataaagagctatagcgctattgcctatggttctgcataacatttttttaaaatgagacgaagattagcaacagtccgggtttcgcatatcgtgttgatggtgaaaacagagcggacactgcttttcatcaggcgtaaatgaccagaaatgacggtggcacgtcaggcaaacggcttcatatgccagtatggcgacgtttttcgccgttccttctgtttgcgtcacttttatcgccgcatgctggcataccgcttcgcagccgcagcaaccggtacaacgtccggtttcgacgatcagttcagcgttctcaaaccgaatcgcgttttccgtacaactccgccagcacgcgccgcacaatacgcactttccggcgtcgagatctatctctgcctcactaaccccagaaaacgctctgcgcagttcacgctgaccgggcacgacgctacaggtccggacatcctcacggggaacgtgcatcagcgcacggcgggcgatattaacctcgttgacggggaaaagtttaaacgcccatgccgcttcaccgcgtcgacgaagcacaagattaagccgggcaatcgccagcagccagtcaggatactgctccacgtcgatactgataaaacgaacatggtgctgtgcatgccagagcagcagttcattcacatccggcgcacgttcagtaaaaggcccgacaagcgtatcgccacacaaaaagcgttttcgcggcgtgatgccggtgatggcctcagtggggcaaacaaacaggcagtcaccgcattcaatacagcggttctcatcaaccgagatatctgcgtccgtaaaagaaaaagcctgcacggggcaaacgtcagcgcaggcgcaacaggaagcatggcgaaaacggcgacggacgcacgcatgcgtcacgtccatcgccgggccaaacgtcaatctgcccatcagccaatactgaagaaaacgaagcgcagcatcagctcacccgcaatcagcaaggcgctgcccagcagcattgtgcctcgcgccgcttttaacccgcctgcagcaaagcacagcatacccacgacagacacacaccagctcagcagatgcacggtgcgcagttgttgcagcatctgtaatggcgcatgagggaacgtcaccacggtgttgtccatagccgagatgtcggccagccagacgggctgcatcaccagacgcacaagcaccagcagcgtgataatgaccaccgccgcacgcagagtagcccgggaacgcatcccaaccgccatgcaggctgaaccaataatgcccaccgagccgataaacagcaccagcgtgttgatatgctgccacgtcaccacggacgcatgcatgtagatctgcgccatgcagaacacatccaccagcccgacaaggcccgccgccgccagaagcagcttccggcctggctttttggcgaacatcagcagcgtcgcgagccccagcgccgccaggtaaaggctggcaaagataatctcacggctcagccaggagctggagacatggcgcagcgcgttgagagcattgagcggatagcccatgtgcagcgccgaggcgagcaatccgaggcttgcgagcacaaacgccccggcagcaggcagaagcgcgctacgctgcaaaacatgcgcccccccgaacgccagccagagcgtcacgcctaccgagccctgcaggaacagtgtaaaaatcagcagcggtaactcatgcatggcgtttgccctctttctctgcactctgatgcgctttgatcaccagattcggttttgtgatggaagaatcaggcaagcctttcacgtcacagaccgcaccatacttcgcccgcagttcatcaatcggcccgaatttaatcgcttcgagtggacaggttgccacacagacgggctgctcccccttcgcctggagatccacgcagaaatcgcattttgacatctgcccggtctgctcgttgagctgtggcgcgccgtaagggcatgaccacgcacagtagccgcagccgacgcacttatctgtatcaacgcgcacaatgccgtctccaggacgcttgtgcatcgccatggtcggacagtttttagtgcagatggggtctgcacagtggttacaggaaatagagagcgtgtaggcaaacacattgttgctgacgccgccctgcccggtggggatgaaattcccgccgttgacttcgtacacgcgacggaaacgacgtccgacctcaaggttgtttttatctttgcatgccacctgacaggctttacaccctgagcagcgtgaagagtcgatataaaagcccagctgtttgtcgctcaccggcgcgtagtgtttaaactgactcatgcttttgccacctccaccagcatggtttgatgtgaattccctttcgcaagcgcggtaatacgagccgaactgagcacgttcgcgcagccgcctttatcaatgcccttctcatccggctgccaccaggcacctgcctgcatggctaccacgccaggaatgatgcgcggcgtaacctccgccgggatctcacaaatgccgcgtgcgttatggatacgcacggtatctccctgcgcaatgccgcgcttctgcgcatcctgagggttaatccacagcttttgctgctgcgcctcaatcagccacgggttggcgtactgggttgagttagcacggtttttccctttccaggtgatcagctgcagcgggaaggttttcgccagttcgtcttccggcccttcatgggcaggcacgtagtgcgacagcgccggaatctccgggtgctacatgtcgtacagacgctttgagaagatctcaattttcccggacggcgttgggaacggatgattttgcgggtcgcgaatgttgtcttcaaaggcgacaaacggcgcgcttttgaagagatgctgacgcgtcttttgcagcgtcgcgaagtctggcaggttttcctccggcatcgacagctttgtctgctcccagatgtgctcaatccacgccttttcgtcacgcccttcgctgaatgccggttcgacatcaagcttagcagcgacctcccgcagccagtcgtagtctgaacggcgctcaaattcaggcacaatcagcttttcggacaggatcagatagcttgcggtaccccaggtttcgccgatattccagcgttccataaagctggtttccggcaggagaagatcggcgtatcgggcgctcggcgtcataaacatatcgctcgcgacgataaactggattttcgactcgtcttccagcacgcgggttgcctgatgaagatccgggttctggttagccagataattgcccgccagcgagaagaggatgcggatattgctgtccagcttttcggcatccttcaggccgacttccgccgttaccttagaggcatcgtcggcggcctgcacccagttcatcaccgatattttggctttcatcgggttatccggcatctccgggccagcggcaaatttacggtttgcacagccgccatagcctgccgcccagccgcctttcaccccgacgttccccgtcaacgtggccagtaacgtcgagccgcgcgcggtgcgctcgccgcagttatgacgctgcggcccccagccctggatcagcgcggcgggcttcgtcgtggcataatcgcgcgccagctgacgaatggtttgcgcaggcacgtgggtgatcttctctgcccactcaggcgtttttgcgacgccatcttttgccccgttcaggtaagccatcaaggattcattggccggaacgccttccggcatagcgtcttcatcaaagcccagggtatagcgctgaataaagtcgcgatcgtgcaagttctccgtgacgatcacgtacatcatggcgtccatcagggcgttatcggttgttggcagcagcgggatccactggtcggcaagggaggacaccgtatctgaatagcgcggatcgacaacgatgaagcgggtgccgttttgcttcatcttctggaagaagtagttgctgtgaccaaaaatcgtttccgtcgggttatgtccccagaggatgaccagtttggtgtccagcagcgtgtccagtgagctgccgctggcggcggtgccgtaggtatacggcgtggctgccgccgtgttccccatgctgaccgagtgatagctttcgagatagccgccggttaagttgaggagacgacgaaccattttatcgccggagaacgttcctcccgaaactgcggtgccaacatgcacatagcgcgaagcagcaccgtatttttgcgtaatggtttttaattgattcgcaataagcgttgtagcttcatcccaggtaatacgttcgaattttccttcgccacgtttacccacgcgtttcattggatatttaagccgatcgggatgataaacaaatttccgatacgcgcgtccacgaacgcaggcgcgcatcaccggcatttgaagatccagttcattatccggacgcgtagagatgcgtgtgaccacgccgtcgctgacgtgcgcccgaatatcgcatttcccgccacagtcaaaggtgctgcaggtttgaatgactttttcttcgggttcgttcactgccgcaggcattgtcgccgcctgcgcttttccgccttttaccacaaacggcagagcggcaagcgcggacccggcctgaataaagtgacgccgggagagagcgggattaagactctctctcagtttcttattttttttcattgctcgttccttcaaataaaaacgcattctcgtttttttgcagaaccgaacattgataattatcaagccaacccttctggattatttcaataagccatttcgaaattcaccgtcgctatttgaccgttttcatccattaccattaattgatattcacccggcaaatataatttcagtgaatatttatattcatgtccctctaaaggctcgccatttaaaaaccaccatcgctgcccttctccaccgctggttgagagagaaagcgttatagttgtctcacccggaagacgcttgatgacggccccctctctaacccctgacagcataagcggcgcgatattgctgttatccagaggcgggcaaactgttgatgctgccgggagacgcgccgctcttttttccgcagcgggcagccacggctccagcggcagcggccagacatccaggactttttcagtagcacccgggcaatctgcggccacgcgtttgccggttttatccagccagaccgggaaacgaatgccgcgtatgccctcctgttcagggagaagcagcgtgggcggttcactcccctccagcagccaggtcgacaggcgacgtcgacagttttcactgccttccggtagcgactggccgcccggccagcagatcacgccccgcccgacgctctccggacgcggatcgcgcggcaggcgggcttcgtctaccgttgaacgtgactgaagcaggttattgacctggtttaacagcggaaccgcgctggcaaacccaaactgtcccgccacgggcgtgccgtccggtcgtccggtccagatgcctatcacataacgggcattcagaccgatggcccaggcatcacgatacccgtagctggtgccggttttccacgccagcggcgcaacctgcggtagcgcattatccggcagcggctgcgcttcattggcaagaatacggcgaataatccacgccgagcctggcgataacagcgggcgttcagtcagcggatcgcccggctgtaaccgcagccttcccgccttaccctgtcgggcaaaggcgctataggccgcagtgatatctgccagccgcgcgcccgccccgccgaggatcagagacaaattcggctgcgcccccgcaggcaagatcagcggcaagcctgcgttgctcagcatcccggcaaatcgttttggtccgtaggcttccagcacctgaacggccggcaggttgagggagcggaccagcgcttcactcatgctgaccggtccatgaaacccgctgtcaaaattcccgggccgataatcaccggtttttctgggaacgtcctgaagcagcgaggcgggatggatcaggccatcatccagcgccatgccgtagataaagggttttaacaccgatcccggcgatcggatcgcattgaccatatccacatggctaaaacgcgtgtcatcgttgatatccaccgacccaacccaaccgcgcactttcatatcggtatgatcgaccacgatcatcgccagcgagctgcgggccggcagacgcgatttccagttcatcgccagctcttccagctgccgctgcagtccggcatccagcgtggtgacaattttcgtgtcgcgacttttgccgagcatcatccgagcaaagagcggcgccagctgcggcatctgccggggcgccagccatactgattcttcacgggactctttgacctgctttgcggaccagacgccctgcgtcgccatgcggtcgagcactttattgcgcgccgcttcggcccgttcaggccagcggtccgggcgtaatcgactcggtgcctgcggcagcaccgccagcagcgccgcgtcggaatagctgagctgcgacggcggcttgcccagatacgtccagcttgccgctcccacgccctgcagcgtaccgccaaagggggcgcgattgagatagagcgtcaggatttcgcgtttggaaagatgccactccagctgcatggcacgccagagctggcgaattttgccgccaaaggtgcgcggatgcggatccagcagtcgcgcgacctgcatggtgagcgtgcttccgccagagatgactttcccggaactgagatcctgccaggcggcgcgcaggacagagagcgggtttacgccggggtgatcccagaaccagcgatcttcgtactggatcagcgcctcaagataacggggagagacctcttcgatcgtcaccggatagcgccagattccgtcgctatcggcaaaacgccagagcggcgtgcccttctcatccaccaccacccgggcagggttaacctctttcagcggcaacggccacaggcggtcggcagcgataatcagcccccctaaaacgagaagcgctcccgccagccatagccagcgggagcgtgtcagacgtgccattcgcatattacggaacaacaatcagcgggccgctggccgcacccgttgcccgccactgcggcacatacatagactcgaccatcggaaccggcacctggtaggttcccggcgtcacggcgcgcgccagataaaccagcgtgaccggctgaccttcatttaccggcacggcggccacaaagcggtcgtcgcggaattccatatgctgaatgtccgcctgctgcatctggctgagcaggttctgcacctcactgccgctgtcctgcaggctggcgctgctgcttgccaggttctggttttccagctccagacccgcaggcaggagatctaccaccagcgcgtccggcacgttctggctggctttaacttccagccacaccagcaccagctcgccgctcttcagcgaagagagtgatttcgtactgccgtcggttgccaggatatgacgttcgacctgcaacacgttcgcgctcggctgaggggcatattccggatagccggtgctgtccaaacgtacccagagcggtgtcgttccggtattggttacctgcagcgcgccaagctggtcgccgctcacgttttgtacctgcgctttatcgccacctgatgcggaatctgacagggaggttttcgcctgccatgcaccggacagagtttgcagcgaacgtccggccaggaacagcgcgttgctctcctgagtggacaaccagcgctggctgaaggcctgttcagacagggcattcagcagcgtattttgcgcatccggcagcagtttgtactcctccagcagggagagcatcagcgcgttatcgcgaagctggctaccgtaatcggccatccaggttttgctgtcgttgcgcggcgttttgagcgccagatccagcgcctgctggctgcgcggggcatcgcccatcagcctgagcgccatgcccagctgcatcagcggcaggccggacgccgcctgagcgtgacgatcccagatttcacgcagcgcgccaagcggcgctttttgctgacgagccagcaccagggcggcataggcctgaacggcaaatttactggcctgagtatcatcgctgtagcggatggacatcatgcccgggtcctgcaggtagcgcagcagacggctattggcgttatttaccgcatcggcaggcacgctatagccctgctcgcccgcccgcaccaggaagtcggtcacataagccgtcagccagtactcttccggaccgtttttatcccacagcgcaaaaccaccttcttcacgctgcatctgcagcagacgggaaataccgatatcaatggcggcacggcgtttatcgtccgtatcacctttgatgccaagcgccgtcagctgcgccgcgttggtgtagagcgacgggaacaggccgctggtggtctgctccaggcagccatacggataggcctgcagttcgcgaatatagcgcgccaggttgagcggtggtttgccgctcagcagcagttgcccctgcagagtggcaggagagaaaccgttactgtgctgcgccggtgcggtccaggattcgccagggttgagcatggcaccggtattcaccgtctgtgccgggaatgccggacgcacgccgattttccagctcttctgctgtggtgcaaaggtctcgcccggaagctgcaggccggtaacctgtgctgttacctctccgtcaccatacccctccagcgcacgcaccggaataaacagggtggtccgcgcccccggaggcagttgcaccggctgcggctgcccaccttccagcgacagtttgcctgtcgcggtcagggaaacgttcagcgtttgcggctggtcggtcaggttggtgagatccagcgtcaggcgtgaggtgtctccacttgccaggaagcgcggcgtgttgagctcggtaataaccggcgcggccaccacaaccttgctttcgctgctgccgaaatcgtcttccgtccaggcctgcgccatcagacgcagttcaccgttgaagtctccaatcggcagcgtaatcgtgccttccccgttggcatccagcgtaaccggctgtgcctgctgggcaatgatggtgacgtggttcaccggcggtttgccgccgcgcttcagttcatccccatcgccaccgaagcgcagcgcggccagacgaccctgcccttcaatgacctggccgtatatatcgtagatatccgcgccgtaacgcttctggccaaagaaagcctgccacggatccggcgtgacgtaatcggtaatgttcagcacgccgctgtccaccgccgagaccagcacgttcaccttctgcggcacggccccctctttcacgctggctttcaccttcaccgagagcgtctggtttggacgcattttctgcgggttatcgagcgcaatattcagacggcgattttcatcgcccatcggcaaatgcagcagaccgaccgcacgtttcggcgtggcggatttggatttatcgcccggacgtaccaccagcgtactcaggtagaggtcgtgacgcttccaggccttgtcgaccgggatagcgagatccagtccgttttccggtacgtcgatctctttccaccacagcggcccttcgctggactcgatcatcgcatagcccttgcctgcggccggcgcggcgatgtgcagattgatggtgtcgcccggctgataggctggcttatccagtttcagcgtcacgcggtcagggcgcgcggccccagtgccatcgctgttatcctgccagctgtagcctgcccagaagcgcacgctgctgaccatttcatcaggcgctttgacttccagacgataagagccccactctaccgggaaggtaactttacccgtttcatcggccttaagcgtcagctcctgctcgccttcgaccaggtctttctgatcgaactgagactgccagccttcgctctcagaccagttccagaagtagtcacgacgctcgcgaatcagacgaacctgtaacccggaaacggcctttttggcgccgctggcatcggcatacacgatgtcgaaactggcgttgccgttctcatcaacaatcggctggttgacggtcgtatcggtgcggtagtcgtaaacggctttactggcgaactgagggcgaatacccggcagctcagccgccggccagatagcctgctcagcgcgacgcgtcaccggacgaccacctgattccagcaggctggcctgcaggatcagctgcagcggagagtgcacgtctttccactggctttcggtagaaacctgcccacgcccctgctcgtccagcgtaagctgaacttcatccaggctgcggctcaggttctcttcggcgatatcaccaaactggaagcccggcagcgcggccaccgcgtcacgcagcggacgcaggaagagctggccctgcagagagttaccgttggccggtgcgccatacaggtaatagccgaccacgttaaagtcgacgttatcctgcggtgaaaccggcgttttttgtccactcaggttgagcgccatgcgctctggcatgaagtcttcgacgtggaagtcccacaggcgctgcaggttatcgcccgtgttggcgcggatatgccacatgccggtctgcgccccgctgtccagcgggtagttgaatcggtagagaccgttttcaggctgaacaacgatcgagcgagccacctgaccgtcagggcgcagcacgtcaagcttcacgggctgatcgggaagcggcttaccgtcactgtcgcgcagcaggccgttgaggatcaccgtttcacccgggcgatagagatcgcgtgggccaaacatgaagaactgcttgctgtagcccggactcccggcgatatcaaactccgccaggtcgagggccggtagcttgaggtcaagcagcgtggtctggccgtctttactggccagaatcagggcagcctctttgtcggtctcaagctttgcgtggccatcgccgtcgctgttcgcttcggcaagggtctgccctttgtcattcagcagggtgacggtgacgccagactgcgccgcaccgttctccagactctgggtgaagatgtccaggcgattatgataacggtgagcggacaggccaatatcgcttaaggtaaagagcgttgcggcgttgctgtagttatagtgcccggcctggttcatgaccgcgatgtaaaccccagactgctggagcggtttaatatccttcaggggcaacagcaatttttcgcgcgtgttgcgcgccggattaagatcgaagcgaccggtgtaaaccagctccgccatctttagcaggttgtcggactcccagttggtaagggagttgcggtattcccactggctgacaaaagaggccagtgattctggcttcacgcggtagaagttcacgtcaacattgttgacgttaagcgccatcaccggcaacccttccaccaccttacccggcagcagcgagccgcggctggcaaacccgacggtaggctcgacgtcccgggtggtgagggctttttcataatcaatgccgaacgtcgccttattcagcgcctgcaggccccgttcaacggtgacgaccaggttgcggttgggctccagatgacgcaggcgaagctctttcaggttaggcgcaagttcccacaccccgtcaactttgccgctttttttgtccacgacatgcacggttttcgcgaaatcctgatcgggattcagcggaaccgagaatgtcagcaccagcgtggcggcaccgtcgagctgaacttcagaagcatccagcagggtcagcgcttttccctgactctgggcggctagcttagccagcgtttcagcatttggcttttccgcggcttttggtgtggatgcggtggatgccgcgggagccgcagcctgaggtttatcgtcgctgttatcacagccgacaagcgtaaacgtagtaagcagcgcaagagagagcgcggctaagcgaaacggtttcatcctttgtccctggcccagagggggcctgttggtcgtcgtccggataagtattatccgcaagtttcattaattcaaaaagtccaattttagaatctggaaaacgcctcgcagaatggcatcacgccgctacgccgtgatggaaccgcgatcacagcgcataacgtcacatgttacctttcacgtcatttgtttttaaaacaagaagatagctggataaacacatctgaagactgctagttttatgaccatgacgcaccccgagtgcgcggttcaaaaagagagaaagccatgaaacgagccgtgaacgccctacaaaatttcggaaaatcattgtacggaccggtgcttatcttaccgatcgtcggtctgtttatcgcctttggtaacgtgctgggtaacggtaatctcgccgagtacctgccgtttctcggtcatccgctgattcagcgtcttggtcagttgatcgcaaaatctgccgtgtcggtgctggttaacctggcgctggtgtttgccgtcggtattccgattggcctggcaacgcgcgataaaggctatgccgcgctgattggcctggtcacctttgtcgtattcatcaacgccatgaacgtcacgctgcagctgcagggcgcactggcgccagcggcgcagatgaaagcggccggacagacgctggtactgggcgtgcaggtgctggagatgggggtctttgccgggatactgaccggagcgctttccggctatctgtacaacaaatattccggcgtacagtttaacggcgcgatggcgatttactccggccactgttttgtcgccattgtgatgctgcccgtctccatgctgctcggcgtggtgttgagcgaactgtggccctttgcccagcatggcattagcgccctggcgctggccatcaaaggctccgggccgtttggcgtggccatctacggtttcctggaacgcattctggtccccaccggcctacaccatctggtttatacgccgttcctctataccgagctgggcggcacgcaggaggtatgcggcgcaacctatcagggcgcgcgcaatatctactttgccgagatggcctgcccggacgtgaagcagctcagcagcaccgtggtgtgggacgcacgcggcatcagcaaaatgtttggcctgcctgccgcggcgctggcgatgtatatgaccgccaggccagagcgtaaagcggcggcgaaagcgattctgatcccggcggcactgacttcgctgctggtcggcgtgaccgagccgattgagttctccttcctgtttgtcgccccgctgctgttcgtggtgcacgcggtgctgaccggcatcggcatgatgctgttctcgctgctgggcgttcacgccatcggcgccaacgggattatcgacttcatcctttacaacctgccgctcggcacggccaagtccaactggccgatgtacatctttgtcgggctgatcatgttcgccctttactttgtggtgttccgcttcctgatcctgcgcttcaacatgaaaacgccgggccgtgaagatgaggaccaggagacgcgcctctacagcaagcaggagtaccaggcgaagggcaataacgacggtctgggcgagtccatcgtggtggggctgggcggtcgggaaaacattgaagtggtggacaactgctacacccgcttgcgcgtcacggtaaaggacgtcgccattatcgacgagccgcgcctgaaggcgactggcgcgaaagggattatcaaacaaggtaacaacgttcaggtggtctacgggctgcatgtcaaaaaaatgcgagaagccgttgagacgtttctctgaaaggagctaaagatgttaacacccccattcattctgtcgattgccggcggcggcagcacctacacgccgggcattgtgaaaagcctgatggtgcgcctgcaggatttcccgctggccgaaattcgcctttacgatatcgacgaagcgcgtcagaacaccattgcgccggtcgtcgagaaggtcattcgcgaccacagtcagcgcatcacatttaccgtcaccagtgacccggaagtggcctttagcggcgcgcattttgtcttcgcccagatgcgcgtcggccagtacaaaatgcgtgagcaggatgagaagatcccgctgcgtcacggcgtggtgggccaggaaacctgcggccccggcgggctggcctacggcctgcgcacgatcctgccgatggtggagcttatcgatctggtcgatcgctacgcgcacgagaaagcctggatcgtgaactactccaaccctgccgcgatcgtcgcggaaggcgtgcgccgcctgcgcccgaacgcaagggtgctgaacatctgcgatatgccggttgccgcgatgcgcaatatgggcgccattctgggcgtggatcgtcataaactggaagtggactacttcggcctgaaccacttcggctggtttacccgcgtgctggtggacggcgaagacaagctcccggcgctgcgtaagcatatcgcgaagtttggcctgctgacggaagatgcggctaaaaccgacccgcagcactcggatccgtcgtgggtgaaaacctggcgcaatatcaagccgatcatggacaacttccccgagtatctgccgaacccgtatctgcagtattacctgatgccaaaccagattgtggcgcatcagaacccggactatacccgcgccaacgaagtgatgaacgggcgcgagaaaaagctgttcgccgccgccgaagaatatcaacgcaccggaattttaccggatgccttccacgtgggcgtccacggtgaatttatcgttgacgtcgcctgttcgctggcgttcaacctgcgaagccgccatctggtgatggtggaaaaccgcggggcgattaccaacctgccgtacgatgcggtggtggaagttcccgcttatatcaccgccgaaggcccggaaccgattcgcgtcggccaggtgccgctgttccatcagacccttttgcaacagcagctcgcgtctgaacagcttctggtggaggcgactatcgaaggcagctatgaaaaagcgttgcaggcatttaccctgaaccgcaccgtgccgaccatggaacatgcaaaagcgattctggatgagatgattgaagccaaccgcgactactggccagcgctgcaaaaagcctggcaggacggcgaaccggtgaaaaaataggggcttgctcgcgagttgaacgtggtttgcttgtcggtgtcagaaaaaacaccgacaatccttttttacggaaaagaatggaggcaacccatgtccacctcatattttgtcgccgccgactggctgattgagcacggcgacgatccggaagtccagattattgacgcgcgtatggcccctccgggacaagagcatcgtgacgtgcccggtgaataccgcgcagggcatctgcctggcgcggtattttttgatatcgaagccctctccgatcatacctctcccctgccgcacatgctgccgcgcccggaagcgttttccgtggcgatgcgcgagctgggcgtcagcaaagacaaacacctcgttgtctatgatgaaggtaacctcttttccgcgccgcgcgcgtggtggatgctgaaaaacttcggcgtggaaaaagtctcgattctggccggcgggctggcgggctggaagcgcgacgagctgccgcttcagcagggtgacgtcacgctgccggaaggcgaattcgacgcgaccttcgacgcccacgtggtaaaacgcctgaccgacgtgctggtcgtgagccatgaaaaaacggcgcaaatcgtcgatgcccgtcctgctccgcgctttaatgccgaagcggatgaaccgcgtccggggctgaagcgtggacacattccgggcgcgctgaacgtgccgtggggcgacctggtatttgagggcgagctgaaaaccaccgacgagctgcgcgccatttttgaacgtcagggcgtggattttcaccgtccgattatcgccagctgcggctccggcgtaacggcctgcgtggtcattctggcgctcgccacgctcggcgtaagcgacgtcacgctctacgacggcgcctggagcgaatggggcgcgcgtgacgacctgccggttgaccccgcgaaataatggataaccgcctggccacgctgttaacgcgcggggcgtcattgacccgcgcggagtatcgcgtcctcgcccacctcacggagcatccgctgctggtgggcaacatcacggttcgcgagctggcacaggcgacgttcgtttctaccgccaccatcatgcggctgtgccagaagctggggttcagcggctttagcgaattcatctggcactgcaagcagctgctctccgacacgccgcatattgccgctcaggcgcagtcgcgtcctgaactcccggtgctgtttaaccagtttatcgccaactatcagcacacctttcagtgggttacccaggacaaacgccagcagttttccgacctgctgcgccagaaagagagcttctttctctacggggccgggttttcttatctgtttgcggagtacctgaccaagaagctacaggtaatgggcaaaacggcgtttatctccggaccgggcgacagccggaacatttttctcagcaatgccgcccgctatcaggtgtttattgccgtctcgcgcagcggcgaaacggagcaggtgctggataaagcgcggatagctaaaaacgtcggcatgacgatcgtcgcgtttacccgcgcctcggccaacacgctggcggagatggccgacgttcactttgcgctctatgacgaagcggtgcactttgccgccgaagccgcaggggtgacgtcgtttgagtcgaatctggtgctgctgatggatttactgctgctggaagctacggggtgatattcaccccgctgtcatcagataatgcggttggtcttgagatcgcgcagaaagccgccccagcgacgctcgtagaacggcgtaatgtgctcggtaataaagtggctgatgcccttcttaccgtttttcacctggcagatatcaattggttcatcgcccggtagcgtgtcggtcgccacgctgcccgctgcctgaacgatctcgtcgaaatcgccatcggcttcaataccgatcaacagcaccggcttttcgtccgcgcgctctttaatggagcagagaaacgcgcgcctgacgggcttgagcgttttgaacagcgtcgtcagggaatcaatcatctgcgcgggcggctcggccacttcagaaagcagcagcgtttcgcccccttccagcacttcctgcgtgctgagcgggttgccctcttcgccaatcaggtggctgatttcacgtggcgtaaactctttcccggtcggcagcttcgcgttcaggaacagcgtctggccgagcgtcatttcaaacagggtacgcaccggcatcaccacgaacgcctgttcatcttctaccgctttctgcaacgcttccagcgaggtgaagaacgggatcaccgacgtgccgtcgtctttctcccagtgcagcagatccagcgcgctgtcttctacgacctgttcaccttcagccgcagtgcccggcacccagacggtggattccagcagcgtgcggaaaaaggccggacggtgggcgggctcggtcgccgcctgctccagcagggtttctaattcgtttttggtttctgacatagtttggctacttcacacttgcccggcggcgctacgcttgcacgggcctacgggttttgtaggccgggtaagcgtagcgccacccggcaaaaaagattactcagccgtcagcaggttcgccacggtacgcacgcccagaccggtcgcgcctgcggaccactgctcaaccgccgctttacggtacgtcgcggagcagtcgatgtgcagccagccctcgtggtagttctcaacgaagtgagacaggaagcctgccgccgtgcttgcacccgccgggtacgccgcgctggcagtgttgttcagctcggcaaagttagacggcagctggctgcggtggaactcggccagcggcaggcgccagaacggctcgttctctgcggcagcgctcgccagcaggcgtgcggccagcttgtcgtcaaagctgaacagcgcgtggtagtcattacccagcgcggttttcgccgcaccggtcagagtcgccatgtcgatgatcagctcaggcttctgggcagatgcgtcgatcaggccatcggccagcaccagacggccttcggcgtcagtgttcatcacctcaacgtttttgccgttacggtagcgaatgatgtcgcccagcttgaaggcgttgccgctcaccatgttgtccgcgcagcacaggtacagcttcacgcgctttttcagaccgcgggtgatggcaaaggccagcgcgccggtgagggtggccgcgccgcccatgtcggacttcatggagtccatgaacgcgctctgcttcaggctgtagccgccggtgtcgaaggtgatgcctttacctaccaggcaggcaaagacaggggcgtctttatcgccggttgggttgtagtccagcgccagcagcaccggaggacgctcggagccgcggcccacggtgtggatacccatgtagttctgctctcgcaggtcttctcccttggtgatgcggtaggacatcttgtcgcccgccacgccgcacaggagatcaacggcgcgctgcgccagctgctcagggcctaactcttccgccggggcgttgatggtgtcgcgtacccagtcgataatttgcaggcggctttccagctctttctgaccggcttcgtcgaggttcgcccactcaattttgcgggtgcctttcggccctttgtaacccgcccagaacgcccagctgcggtcggtgtcccacccttcgccttccagcgagacatgcttaatgcccagaccgtcaattttacgcgcggcgcgctggatcaggcccaaatcatcattgcccgtcaggtgcagggtaataccgtcgttattaatgctgtaggtggctttctcgccccagcgcgcgtcggcaggctgattcgagagcgtaatcttcatcgcttcggtcattttatttttccttattagcaactagcaaacgggccgcctgaaggcagcccgttttgttatttattctgcttcatctaaccagactaacagaatcgcctccagaattttttcattggatgcgtttggatcgtcgtcgaaatcctctaaatcgcagatccactgatgcatatcggtgaatcgtacggtcttcggatcgagatccgggttcgcgtcgtagagcgcttcgccgatttcacggctgtctgtccacttcagtcccatattaatgctcgcgtgcgtggttgatggtgtagcgtgggaactccacgaccagatcttcatcggtcaccgcagcctggcagcttaagcggctgtccggctccagaccccatgctttatccagcatgtcgtcttcgtcttcggtgctctcggcaagagagtcaaaaccttcacgcacgatgcagtggcaggtggtgcaggcacaggatttttcacaggcgtgttccacttcgatacctgcacgcagggctacatcgagaatggtttcgccggtcttcgcttccagaacagcgccatccggacagaggtccgcatgaggcaaaattacaatctttggcatattaaacctcgtccacggactggcctttcagcgcgacgcggacagatttgtccatgcggcgagcagcgaagtcctgggtttgtttatcaacgtttttaatggcttcttctattgcgtcagcgtcatcgcctactgcgacagcgcttaagcgcgcggcagcgtcgtcaatcacctggcgctcagcggcgcttaacagcgcggcgtcggcagcgagcgcgccgttcaggctctccagcacgcgtgcggcttccactttttgttccgccagcatacgcgccttcacatcctgctcggcgtagctcattgagtcctgaatcatggaggcgatttcgccatcggtcaggccgtaggacggcttaacctgaatagacgactcgacaccggtcgatttttccatcgccgtgacgctcagcagaccgtcggcgtccacctggaaggtgacgcgaatatgcgccccgcccgccggcagcgccgggattccgcgcagcgcaaagcgcgccagagaacggcagtcctgcaccagctcgcgttcgccctgcatcacgtggatggacatcgcggtctggccgtctttgaaggtggtgaactcctgcgcgcgcgccaccggaatggtggtgttccgcgggatcactttctccaccaggccgcccatggtttctaaaccgagagacagcgggatgacatccagcagcagcatttcgctgtccggcttgttgccaaccagaatatcggcctgaatcgcggcgccgacggcaaccactttgtccgggtcgatggaggtcagcggcgtgcggccaaagaattcacccacgcgctcgcgcaccagcggcacgcgggtcgaaccgcccaccatgaccacttccagcacctcgttcgcctcaacgccggcatctttcaatgcgcgacggcaggccagtaaggtgcgtttcaccagcggggcaatcagttcgttaaactggtcgcgggtgatgtcaccctgccagcccgcaacattgacggtaaccgtctgcgcatcgctcagggcgattttggcgtcgatggccgcatccagcagttcacgctgtacgcgcgcatcgctgcgatcgctgatgcctgcctgctcgcggatgtagtccgccagcagatggtcgaagtcatcgccgcccagcgcggaatccccgccggtcgccagcacttcaaataccccgcggctcaggcgcaggatagagatatcaaacgtcccgccgccgagatcgtaaaccgcgatcaccccttcctgaccggaatcgaggccgtaggcaatcgccgccgccgtcggttcgttcagcagacgcagcacgtgcaggcccgccagacgcgcggcgtctttggtgccctgacgctgtgcatcatcaaagtaggcgggaacggtgatcaccacgccgtccagatcgccgccgagcgtggccgtagcacgctccgccagcgctttgaggatgtcagcagaaacacgaatcgggttcagcagaccggccgcggtcgcaatcatcggcaggccgttttcactggcctgcagctgatacggcagatgcgggtagcgggtctgaatatcggccagcgagcggcccatcatgcgcttgacggagctgatggtattcgccggatcgcgcgcggcgttagcgcgggcgtcatagccgaccgcgtgaccctgctgctggtagtggaccacggaaggcagcagatggcggccctgctcgtcagccagcgtttccgcctggccgctgcgcacggtcgccacgagggaattggtggtacccagatcaatacccaccgccagacgacgctggtgcggtgcggcacttaagccaggctcactaatttgtaataaggccataattgcttccgaaattaaaaatcgagcagcttttcttcgagttgttcagcactgcttcgcagtttatcgagaaaacggagtttgcgcacagtgtctgccgccacgtcccaggtctcgttgttcagttgctccaccatctgctgatggcgggtatcgaacatgcccttcacgcgcgtgatgaagctttccagacgcgcttcgtctttggcctgttcaatctcatccagctcttcgcgcagctccagctgctccatcagaaacgccgtgtcgcgcacggtgtgctgttcgctcgccagatcaaaaccgtggagcgagagcagatactcagcgcgcgccagcggatggcgcaacgtctgccaggcctggttgatggtcgcggattgcgacaccgcagccagctgctctgcctgagtaccgctcgcgaatttgtccggatggtactgacgctgcagatcctgaaaacggatcgtcagcgcctggagatcgatcgggtattgagcgggtagtccgaagagagtgaagtaatccataacaatctcaggggtagcctgttagaacaaaccccacgcgtagcgggtaacgccacggtggggtttcggatgacgcgcggttaaacgtggaagctttcgccgcaaccacactcgtctttgacgttcgggttcgtaaatttgaacccttcgttcaggccttctttgacgaagtccagctgagtgccgttgaggaattgcaggcttttgccatcgaccaccaccttcacgcccttgtcttcaaacacgatgtcgtcagacgccggctcgtcaacaaactccagtacgtaagccataccagaacagccggaggtacgtacgcccagtcgcaggccaaagcctttaccacggttcgccagaaaagagcttactcgcgcggcagcgctgtcgctaagggtaatcgacatactcaaacctcaattattttgcttcacgtttgcttttgtaatccgcaatggcggctttgatcgcgtcttctgccagaattgagcagtgaattttcaccggtggcagttcgagttcttcagcaatatccgtgttcttgattgcctgtgcttcgtccagagacttgcccttcacccattcggtgacgagggagctggacgcgatagcagaaccgcagccgtaggtcttgaagcgcgcgtcttcaatgataccttcattgttgactttaatctgcaacttcatcacgtcgccacacgctggcgcaccgaccatgccgctaccaacggattcgtcgctgttgtcaaaagagccaacgttgcgtgggttttcgtaatgatcgatgactttttcgctgtatgccatgattgaattctccttatgtaccgattagtgatgtgaccattcaatgctgttcagatccacgccctgtttgaacatttcccacagtggagaaaggtcgcgcagacggccaatggagttgcgaaccagcttgatggtgtagtcaatctcttcttcggtagtgaaacgacctaaagagaaacggatagagctgtgtgccagctcgtcagtcatacccagcgcgcgcagcacgtaggatggctcaaggcttgcagacgtacaggcagaaccggaagaaaccgccaggtctttcagcgccatgatcagcgattcgccttcaacatagttgaagctgacgttgaggatgtttggtgcgccctgctcgagatcgccgttcagatacacttcttccatatctttcacgccgtcccacagacggttacgcagcgtgcgcaggcgtgccatctcggtttccatctcttcttttgcaatgcggtaggcttcgcccatgcccacgatctggtgaacaggcagcgtaccggaacgcatgccgcgctcgtgaccaccgccgtgcatctgtgcttcgatgcggatacgcggtttacgacgaacgtacagcgcgccgatgcctttcgggccatagattttgtggccggagaaggacatcaggtcaactttcagctggctcaggtcgataggcagtttgcccacgctctgggtcgcgtccacgtggtagatgataccgcgcgcgcggcacatttcgccgatggtcgcgatgtcttgtaccacgccgatttcgttgttgacgtgcatgatggagaccagaatggtgtcatcacgcatggccgcttcgagctctttcagatcgataatgccgttgctctgtggcgccagataggtgacttcgtacccttcacgctccagctggcggcaggtgtccagcacggctttgtgttcggttttgctggtgataatgtgcttgccttttttctgataaaagttggctgaacctttgatcgccaggttgtcggattcggtcgcaccggaggtgaaaacaatctcacgcgggtcggcacccaccaggtcagcaatctgattacgggcgatatcaaccgcctcttcagcatgccagccaaaacggtgtgaacgggaagctgggttaccaaagtttccgtccagggtcagacactgcatcattttctcggcaacacgcgggtccaccggcgtggttgcggagtaatcgagataaatcggtaatttcattgctctttaaactccgtacatcgcttcaatgcaaggaatcaggcaaccggctggatgtacgaccgagtacacggggcgagtctacgccccggcctgattctgaaatacttatcgttttattacgcgcgtaatttgacgtcgatagcgtcctgcgcgcgggtgctgcgttgggaatcatggctgtgctgacggcccgaaacatccagaacttcctggttattcaccagctccccgagggtgatgttgttcaggaagccggtcagacggtcgctcagatcgcgccacagcgcgtgggtcaggcatttatcgccgccctggcagccgcctttaccctggcaacgggtcgcgtcaacggattcgtcaacggcgctgatcacttcgccaactgcaatactgcccgcgtctttacccagcagataaccgccgcctgggccacgaacgctggaaaccagtccatttttacgcagtctggagaacagctgttccagataagagagggagatcccctgtcgttcagaaatatcagccaacggaaccgggcccgcttcggagttgagcgcaacgtccagcatcgcggtcacggcataacgccctttagatgtcagtctcatgtcttacttaacctcaaactcgcccctgcccggggttttttattgtaaaatggggtattgcatagcagggccaagtctgacattcctgactaaaatggtcaactatttacttgactgttttagtcaggtatttaaccttctgtgccgttttttgtcgggtggcgcttcgcttacccgacctgcggttttgtaggccgggtaagcgaagcgccacccggcgaacagacgacactactctttatttttctgctcaatcgacgccaggatcccgcgcaggatgttcagctcttggctttccggacgcgcgcgggtgaacagacggcgcagcttgttcatcacctgacccgggtggccttcgcggataaagccggtcgagagcagcgtctgctccaggtgaccgtagaaacgttcaaggtcgtccaccagcgggtaagccgtctcttctttaggctcaacctctttttcctgcgttgccagccacgccatacgcacttcataggcgataacctgcaccgccatcgccaggttcagcgagctgtactccgggtttgccgcaatcgccacgtgataatgacacttctgcagctcgtcgttggtcaggccaacgcgctcgcggccgaacaccagcgcaaccggtgcttgttcagcctcagagacacttttcaggccgcattcacgcggatcgagcattggccacggcagcgtgcgcgaacgcgcgctggtaccgacaacgaggctgcagccggccagcgcttcgtcaagggtatcgacgatctgggcgttgccgatcacgtcgctggctccggccgctagggcgatggcctgcgagtctggcttcaccagcgggttaaccagccacaggttcgttaagcccatggttttcatagcgcgggcaacggagcccatgttgccggtgtgcgatgtttcgaccagcacgattcgaatgttttgcagcataatttttaatgtctggattcagtgtctgaagaatattcgggcatattatcataaacgggagacataatccgatcccgctgctatactctgcgccgattttcctgttctttaacatccagtgagagagaccgatgcatccgatgctgaccatcgccgtgcgcgcagcgcgcaaggcgggtaatgtaattgccaaacactacgaaacgccagactccgtagaaaccagccagaaaggcagcaatgatttcgtgacgaacgtcgataaagccgcagaagcgattattatcgaaacgatccgcaaatcttacccacagcacaccatcatcaccgaagaaagcggtgaacatgaaggtaccgatcaggatgttcaatgggttatcgatccactggatggcaccaccaacttcgtcaaacgcctgccacacttctctgtgtctatcgcagtacgcattaaaggccgtactgaagtcgccgttgtgtacgatccaatgcgtaacgaactgttcaccgcgacccgcggtcagggcgcgcagctgaacggctaccgtctgcgctgcagcaacgcacgcgatctggacggcaccatcctggcgaccggtttcccgttcaaggcgaaacagcacgcgaccacctatatgaatatcctcggcaaactgttcaccgaatgcgcggacttccgtcgcaccggttctgctgcgctggatctggcctacgttgccaccggccgcgttgacggttacttcgaactctcactgaagccatgggattttgcagcgggcgagctgatcgcgcgtgaagcaggcgccattgtgtgtgacttcaccggcggccataactatatgtctaccggcaacattgttgcgggtaacccacgcgttgttaaagccatgctggccaacatgcgtgatgaactgagcgatgcgctgaagcgttaatccagtttgttaagcccggtggcgctacgcttaccgggcctacaaaatccctcagtacgctagaaaggccgcaatccccttcccaccggcaccgcgctcatccacatcgtcaccgccgccaccagcagaatcactccccccgccagcgcaagcgtggtccaccctatctgtcgccacagcaccggcgttttactgccgctgagtttgaccgccagctgacggaagctgtgaaccagcagcgctaaagacgaaatggtgagagaggttcctgccgccatcgccagcgccgagagcattccccagccaaagacacctattatcttactgaacagcagcaccataatggcacccgagcacgggcgcatccccatcgagagaataatcatcagccgggcgcgccagtcgtcgccgttctgtaattgttcctgcgtgggcagatgctgatgaccgcagccgcagtgttcatcatgaacgtggtgcggcgtaaaggctttgaacgtgggctttttcagcagcgcgcgcagttttttcagcgcccgccagcagaggatcagccccagcacgcccaccagcgcatagctgcccttctccagccagaagctgctcatgtgtagctggcgcgccggaagctgtaatagcgaaagcacaacaacaaccagcgcaatcgccacgccgccctgaagcagcgaagaggccagcgtcaggccgatgctcgatttcagcttagacggatgggtggcaagccaggtggtgatgacgattttgccgtgccccggccccagcgcgtgcagaacgccatagacaaaactgaacgccagcagcgagccgcccgctttggccgggttctccgccaccgccttcagcagtccgctcatctgctggttgacttcacgctgccagataatgcttttcatcatcacctgcggccaggcctgccacagccacagcgccccgcaaaccgcgaacagcaaaaagagcgccagcggccagaggtgaagccagcgacgcggcttgcggatcggagaggagatcactgacattgtaatgtcacctcctgcgcgaactgtttacccagctccatgtcctcaggcggggcatcttctttatccagcgagatcgcaaagttcagcgtctcttcgctgggtttcggggtgtgcacgccaattttgcagcttttttgcagcgcgtccggcagccgtacgtcgctgtctttgtcatagcgcatgtcgacatagtaggtagggtcaaaagtggaaaagcggtacgtttgccccgccagcggctgaggatgcgccagcggaagcacgaacgtcagcaccgcctgatgcccgtcacgcgtcatcccgtattccgttggacgtttctgaaatttgaccttttgtccgttatgccagaattcggtgaagtagtgctggccgagcacgttggccattacttccgccgccagttttttccagatgtcgtcgccgggcttcgcgtttcccgcatcatagagcaggtcagccgaggtgatttcatccatcgtccagcgcattttcaggccgctcagctgcgtgccgtcggtgaccagctcggtctggaggccaataaaactgtgagggtgggcgctggcggtgaaggtgataaccgccaaaaatagcgccatcgcactttgtttaactgtttgcatcaattcctcacgtcaaaaattctgtgatgttcccctgcaatcctgagtgaaaggcctgccggcgcgcttttcagcgctcatcctttagctattcttatcaaacattcacactggatacccgacagatgatgacgacgcttgaaattccatctgtgctttccagttcgcagcgccgctgccaggtgcttttgatgctttacctgcccgatgctgccgtcaccgcacagagcataatcgctgccaacggcgtggacgacgcgatggcacggcaagatatagccgagacgcgcgatgaaatccagcgctatcaccggctggatatcgtcacgcaccacgacggctgctaccggattgaaggcacagccctgaatcagcgtttatgcctgctgcactggctgcgccgggcgctgcggctttgtccgcagtttgtctcgcaccagtttacccccgcattaaaaaccgcgcttaaacaactcggcatcgcgcgcccgctttacgacgatgcgaacctgcgggcgctgatcggcttctgctcacgcaagctgcagcgccagtttgaatgccgcgatgtgcagtttttacagctctatctgcaatattgtcttattcagcaccagctcgggaatacgccgcagttttcgcatgcccagcgcagctggacccagtcgcggggagagtattttacggcgcaggagattgtccgccactggaagcggcgcgtgccgcagggcgcgcacgtggatgaacagctgtttctggcgctgctgtttatgatgctccgcacgcccgatccggtgctcgataagcaccagcaggatcagcgtctacgccgggccatcgtgcgcatggtggcccgttttcgctcgcagaccggaatgaacttcagcgatgagcaggggctgaccgatcagctgtatatccatctggctcaggcgctggaccgttcgctgtttgagatcggcatcgacaacagcctgccggaggagatccatcgcctttatccccggctgttacgcaccacgaaagaggcgctgtttgagctggaggcagaattcgggctgcgtttttccgacgaagagatgagcctggtggcggtaattttcggtgcctggctgatgcaggagaccgatctgcatgaaaaacaggtgatcctgctgacgggagaagacaaagccagcgaggaacagatcgaacagcagcttcgcgagctgacgctgctgccgctcaacattcgctacctgacgctggaggcctttcagaaagagggggcgccgcgcgaagccgcgctggttatcaccccctacccgacggccctgccgctgttctcgccgccgctgatccatgccgttgagacactgaacgcgcagcagcaagaacatattcgcgccatgctggaatcatagcgacgcgcgggcggccactttaggtcgaacaacaatggcgggcaaggcaacgagcgccatcacccagaagacgccgtgccccaggtgctggtaaaggaaccccgcaaacaccgtcatgatcgcaatactgccccccattgccactgccgaatagacggcctgcaggcgaatcacgtccccgccctcgcgcgctgcgatatagcgcatggccgccagatggcacacggtaaaggtgccgcagtgaagaatttgcgccacaatcagccacggcagatcggtcgtccagcccataatcccccagcgcgccacgccgcacacggcggaaagcagcagcaggtcacgcgcgccaaagcggcggaacagttttttgctcagggcaaagataatgacttcggccaccacgcccagcgaccacagatagcccacggcggaagcggaatatcctgcgccttgccagtagatggcgctgaaaccatagtacgccgcatgtgccccctgaaggaggcatacgcacgccagaaaacgccagctctgtgcgaccaggctccgccaggcgggccagcctgcgctctcctgatggcggctttccccctgcggcatcaccgacggtcgcagaagcatgcccagcagcattgaggcaataccgatgctcagcagggcaagaatggcgcggtaatcgtaaaggctgaccagtttgcccaccagcgccgagccaatcacaaaggcgatagaaccccacaggcgcacgcgaccgtagtccatggtgatctgcttttgccaggtgttcgccagggcatccgtcagcggcaccagcggtgagaagaacaggttaaagccaaccatcaccaccatcagccaggcaaactgatggctgacccagaagcaggccacaaagaccagggtcagcagagccaaaatgcgtacggccttgatcaataaggagggatcgctgacgcgcggggcgatcagcaggctgccgaggaaacgcgccaccagcccggcccccagcagaacgccgatggtctcgggcgtcaggccgatacccttaagccagacgctccagaaaggcagaaaaatgccgtagctaaagaaataggtgaaataactgagcgccagccagcgcgtggaatgcaagaccatgaatccctcccgaaatcgaggccatagtctggcgagaatataaaaattaagcaagtagatagcctgctataaattaacgaaaaattaacatcttgtgcagtcgtctggcttatggcagggaatgaaaatgtgtattacgtttaaattactccacttgcagaggtatttctgccatgaactcactacgttatctcgattttggtcagtcgcgtcatctgctgctgctcattggccgcatcgcgcttgtcgtgctgtttattatctttggttacccgaaactgacagggtttagcggtaccgtacagtatatgacctcgctgggtacgccgatgcccatgctggcggccattattgcggtggtgatggaagtgcctgctgcgatcctgatcgtactgggctttttcacccgtcctctcgcggttctctttgtcttctatacgctgggcacggcgattatcggtcaccactactgggatatgaccggtgatgcagtcgtaccgaatatgattaacttctacaaaaacgtcagtattgctggcgcctttattttgctggcgattgtcggacctggcgccatctccctggaccggcgttaagccataaaaaaaggccgcatgcgcggccttttttatttctgcaaagcagaggaattatgcgtataccgggaagcgtgcgcagatatccagaactttacctttgacgcgctcgataaccgcttcgtcattgatgttgtccagaacgtcacacatccagccagccagttctttcacttccgcttctttgaagccgcggcgagtcacggccggagaaccgatacggataccggaggtcacgaacgggctcttcggatcgtttggcacgctgtttttgttcacggtaatgttggcgcggcccagggctgcgtcagcttctttaccggtcaggttcttatcaaccagatccagcaggaacaggtggttttcagtcccgccggataccactttgtagccacggttcaggaacacttccaccatcgctttggcgttcttagcaacctgctgctggtaaaccttgaactctggctccatcgcttctttcagcgcgaccgcttttgccgcgataacgtgcatcagcgggccgccctgcgcgcttgggaacaccgcggagttcagttttttgtacagctcttcgtcaccacccttcgccaggatcaggccaccgcgtggacccgccagggttttgtgggtagtggtggtcacaacgtgcgcatgcggaaccgggttagggtaaacgcctgcggcaatcaggcccgctacgtgcgccatgtcaacgaacaggtaagcaccgatgctgtctgcgatttcgcgcatttttgcccagtcaacgataccggagtaagcagagaagccaccgatgatcatcttcggtttgtgctctttagcctgcttcgccatgtcttcgtagtcaattttaccggactcatcaataccgtaagggatgatgttgtacagtttgccggagaagttaaccggggagccgtgagtcaggtggccgccctgcgccaggttcatacccagaacggtatcgcccggctgcagcagcgcggtgtagaccgcgaagttagcctgagagccagagtgcggctggacgtttgcatagtcagcgccaaaaagttctttcgcacgatcgatagccagctgctcaacgatatcaacgtactcgcaaccgccgtaatagcgtttgcccggataaccttcagcgtatttgttggtcagctgagacccctgcgcctgcatcacgcgcgggctggtgtagttttcggaggcgatcagttcgatgtgctcttcctgacgtactttttcctgctccatagcctgccacagttcggcatcataatcggcaatgttcatttcacgctttaacatccgcatctcctgactcagctaacaagtaaattttggcctgaaaaggcagtcctgttggacgacgggcaacagtataactgattagttctgtgataacaggtcttgacaaacgattttacgcaaacgttttcctacccgccacgcaagggtttgaggaataaagcgctcgccctttcaagcggatttcttttcaggtttgtgatgcatatttttcatcttgcaaagaaccatttacaacgcaggggtatttttataagatgcatttaaaatacatcattaaaatgacatcagaaggacgcgctcatgctcgacgctcaaaccatcgctaccgtaaaagccactattcccctgctggtggaaaccggccctaaactcaccgcccatttctacgatcgcatgttcacgcacaacccggagctcaaagagattttcaacatgagcaaccagcgtaacggcgatcagcgtgaagcgctgttcaacgccatcgcggcttacgccagcaatattgaaaacctggctgcgctgctgcccgcggtggaaaaaatcgcgcagaaacataccagcttccagatccaacccgagcagtacaacatcgtcggcactcacctgctggcgacgctggacgaaatgttcagcccgggtcaggaggtgctggacgcgtggggtaaagcctacggcgtgctggcaaacgtgtttatcaaccgcgaagcgcagatttacagcgaaaacgccagcaagaacggcggctgggaaggcacccgcgcgttccgcatcgttgagaaaacgccgcgcagcgcgttaatcaccagcttcgagtttgagccggtggacggtaagccggtggccgattaccagccaggacagtatctgggcgtgtggctgaagcctgaaggtttcccgcatcaggagatccgccagtattctcttacccgcaagccaaacggcaaagcctaccgcattgcggtgaagcgtgaggacggcggtcaggtttccaactggctgcacaacgaagctaacgtgggcgacgtggtcaatctggccgcgccagcgggcgacttcttcatggccgttgaagcgaataccccggtgacgctgatctctgcgggtgtcggccagacgccaatgctggcgatgctcgatacgctggcaaaatcacatcacggtgcgcaggttaactggttccatgccgccgaaaacggcgacgtgcacgcctttgcggatgaggtgaaaacgctcggagcctccctgccgcgtttcaccgcgcatacctggtatcgtctgccgacggaagcggatcgcgctgccgcgcaatttgacagcgaagggttgatggatttacgccagcatgaaggtgcgttcagcgcaccggagatgcagttctacgtctgtggaccggtggcgtttatgcagtatgccgcgaagcagctggttgagctgggcgtgaacaaagacaacattcattacgaatgtttcgggccgcataaggtgctgtaatgcaaaaagcccctcgtttgaggggcttttttccgtcgggtggcggctgcgccttacccggcctggaaaatgcttaaatcgcggcgtcgtcttcttcgccggtacggatacggatcacgcgcgccacgtcaaagacgaagattttaccatcgccaatcttgccggtctgcgccgtgcggataatggtgtccacacaggtgtcgacgatatcgtcgctgaccacgatttcaattttcactttcggcagaaagtccaccatgtactctgcgccacggtaaagctcggtgtggcctttctgacgaccaaaacctttcacttccgtcacggtcatcccggtgatgccgacttccgccagcgcttcacgtacatcatccagtttgaaaggtttaataatcgcatcaatctttttcatggtgggtccttaaactcttgcctgtaagctgcctcgtaatcgattgctcacagtaccatacggcattactctttaaaatcgtttgcttccagctcatgacgtgacagcagtttataaaactcggtgcggttgcgtccggccatgcgcgccgcgtgggtcacgttgcctttggtgatttgcaatagcttgcgcagatagttcagctcgaactggttacgcgcttcggcaaacgtcggcaaggccgtgttttccccttccagcgcctgctccaccagcgcgtcgctgatgaccggtgaggaggtcagcgccacgcactgctcaatcacgttgaccagctgacggacgttacccggccagcttgcggccatcagccgcttcatcgcatcggtggaaaacgcgcgcacgaacggtttatggcgatcggccgcctggcgcaaaagatggttcgccagcagcgggatgtcttccgcacgttcggccagcgccgggatcttcaggttgaccacgttcaggcggtagtagagatcttcgcggaactcgttgcgggccatcacttttggcagatcgcggtgggtagcggagataattcgcacgttaatatcgatatcgcggttgctgcccagcgggcgcactttgcgctcctgcagcacgcgcagcagcttgacctgcagcggcgcgggcatgtcgccaatctcgtccaggaacagcgtgccgccttccgccgcctggaacaacccttcacggctgcttaccgcaccggtgaatgcgccgcgggcatgaccaaacagttcggattcaagcagctgctccgggagcgcgccgcagttaatcgcaataaaggcgttcttgctgcgcgggctggcgttatgaattgcctgcgcgaggatctctttcccggttccgctctggccgttgataagcacgctgacgtccgactgcgccaccatcctcgcctgttccagcagacgcagcatcacggggctgcgcgtgacgatagattcccgccaggcttcatcccccgccggagcggcatgttccagcgcgctgtcgatagccttatacagtgcgtctttgtccaccggcttggtcaggaagctgaacaccccctgctgcgtcgcggcaaccgcatccgggatcgacccgtgcgcggtcaggataatcacgggcatacccggctgctgcttctggatctccgcgaacagctgcaggccgtccatttcatccatccgcaggtcgcttatcaccagatcgattttctcgcggctgagaattttcagcccctccagcccgctttccgcggtcacgacgctatagccttcactcaccagacgcattcccagcagctttaacagcccgggatcgtcatccaccagtaagagatgggctggtttacggctcgtcatgcttcacatcctcttgtttcggcgtatcgctgtccggcgcagcggatgaactccccggctgatatttacgcgacgagagctgtctttcgatatcggtcaggttctccagcttgcgcgtcgtggtatccagctgggtacgtaaatgttgctgctgttgacgcagcgtatccagctcgctgtcggttgactgttgcagcttgctgtagcgggagcgctcttcagaaagctgaagctgtagcgtctgtccctcgcgccaaagctggtataccgggcggatctgtaccggaagattgacgacaaaggtgtccagccgggtcacgttggcgcggcgttcgacgggggtgattttcgcatctgcgagtaaaatcccacgcttgaacgcgtcctgccaggtatcatcatccagcatcgccgctttcgcgcgggcatcaaccggcgccagacgctgggcgcaatctatcccgcgcagccagaacagcgggttactttcgacgtcatggcctgagaggttccagatgtcgtcacagcgggttgagaggaaatcagccagctggttatcgggccatttatcttcttgtttatcgctaatcgcactttgcggcacatgggaaacacaccctgccagaaatacacagggcaggctcaggcgaagcgtgctgcgggaaaacaccgcgcgtacggcgcgggaaaagacgtgtgacatactcaccagacatagattcattttattgatttttccggctcaggggcagttcaatacggaagcaaacatccgaacgttcgtccgtggcgatgttaagctcaccctgcatgcgtcgtatgcagtcccgggcgatgcttaagcccagaccactgcctttcaccgcacctttccgctgatgactcccctggaaaaagggctcgaagatcatggttttttcgtcatcggggatcggggtgccggtgttagcgacgtctataaacacccgggaacccttcgtatagcttcggatataaatgttaccggattcagtaccatagtgcaccgcattggaataaagattatccagcacgctcattaacagcatgggttcagcgagacaggtcggcgcattcagctctacaccggtatgcatcattttagctcttgctggcaggctatgggcggagatcaccatatccaccagcggttcaatgtagacgttttccagtacgaccgctccgtcagccagcttgcggttgtaatccagcagctgctcaatcagcttctgcagattgcggctgctgttatccaggatctcgacaatttctttctgttcgggcgtaagcggcccagccacttcgtccgccagcagctccgtcccttcgcgcatgctggccagcggcgttttaagctcatgggagatatggcgcaggaactgatgacgctgtgattcaagccacgccaggcgctcggacagccagataatacgctgaccgacggaacgcaattcgcggggacctttaaaagcgaccgtatccccgagcgatttcccctcccccaggcgattgatcatccgctggatacccttcaccgggccgatgatcatgcgggtaaagagcagcaccagcccgaggctcacaaggaacagcaccagcgcctgccagccgaagaactggccgcgctcggcaatctcctgctgaagctgctggccacgagagaaaattaccgtgcgggttgactgcaccatctcggtattggcgttggcgaaggcttcgaggcgcgcggcggcggcggcatcgggtccactgttgtggcactgcagctgcgcaagatcgttcagatcctgacgtaacgcctgatacagtttgtcgtcaggcagtacccccgcgtgagcgtccagcatttcgctgtagcgcttgcgctggctctgataaaccttttccagcgtgcgatcgtcaagcacgcagtactgacgatagctacgctccatctcaagcgcggcgttggtcatggcttcactgcgtcttgcgtcaataagcgtcgtgcggttcgtcagtgccgcctgggcactcaacgcgttcaggctttgccaggcctgccaggcaaggatcagcaacggcagcaggatcagcagaaaggccatcatgacgagctgtcgcagggaacggggaaaaacgggccagcgtttcaacgcattactctcttaatggggatatacgcagagcgtaactgagtctgcccttcagatacaacaaagccgggtaaaaacccggctttgtcatggaatgaggcggtgcctaactcgacgtttcgccctggcctgataaagcatcgctatgatcagtagttggacggcaggcacctttttgtgcgtcattcgaagtttatgtagcacgtcccgaaggggctgacataagaaggtgaatgagccactggttaatattatgcaacacccatgccagaacgcaaaacaaaattttaacacattgaaatatatactttttactcgtttaaccggttaattatcggttgaatgatttccaggctaagtgtcgctattaagcaacaccttaacgggaaccttttctgccgcatataaatcaataggttaaatgtctccttttggagacactcaaaccagagggttgtcgcgattttgcgacagagacaaaaaagcccggtggcactcgcgcctaccgggcctacagtcaggatgctgaaacttaacccagctgtttacgggcgttgcggaagatgcgcatccacgggctgtcctcgccccagttttccgggtgccaggagttgctcacggtgcggaacacgcgttccgggtgcggcatcatgatggtggcacgaccgctttcgctggtcaccgccgtaataccgttgacggaaccgttcgggttagccggataggtttctgttaccttgccgaagttatcgacaaagcgcagcgctaccagacctttgctctccagctgagccagatgcgcagcatcacgcacctctacctgaccttcaccgtgggaaacggcgattggcatctgtgaaccgaccataccctgcagcagcagagacgggctctgggtcacttccaccaggctgaagcgcgcttcgaagcggtcagactggttacgcacaaagcgcggccaggcttcgctgcccgggatcagctcgcgcaggttagacatcatctggcagccgttacacacgcccagcgccagcgtctgcggacggtggaagaaggtttcgaactcgtcgcgcacgcggctgttgaacagaatggacttcgcccagccttcgcccgcgcccagcacgtcgccgtaggagaagccgccgcacgccaccagcgcctggaaatcttccagaccggtacgtccggccagcagatcgctcatgtggacgtcgatagcgtcaaagcccgcgcggtggaaggcagccgccatctcaacgtgggagttaacgccctgctcgcgcagcacggccactttcggacgcgcaccggtcgcaatgtacggcgcagcgatgtcttcgttgatgtcgaaggagagcttcacgttcaggccaggatcctggtcattggccttcgcgttgtgctcctgatcggcacattccgggttatcacgcaggcgctgcatctgccaggtggtttccgcccaccacatgcgcagcgtggtgcggctttcgctgaacacggcgtgaccgtcagcttcaatgacgaagcggtcgccctgaacggctttacccagatagtgtacgcagtcagccaggccatgctgcgccagaatcgcttcaaccgcatcgcgatccgccgcacgcacctgaatcacggcgcccagctcttcgttgaacagcgccgccagacggtcttcgccaagcgtcgcaatgttcgcttccacgccacagtggccggcgaaggccatctctgccagggtcaccagcaggccgccgtcggaacggtcgtggtaggccagcagcttacgctgcgccaccagcgcctgaatcgcgtcgtagaagcctttcagctgcgccacgtcacgcacgtcggctggcttatcgccgagctggcggtaaacctgcgccagcgcggtagcacccagcgcgttgtgacctttacccaggtcaatcagcagcagggcgttgtcttcggtcgcaagctgcggcgtaacggtgtgacgcacgtcttccacgcgggcaaacgcggtgatcaccagcgacagcggagaggtcatctcgcgctgctcgctgccttcctgccagcgggttttcatcgacatggagtctttgcccaccggaatggtcaggccgagggcaggacacagctcctcgcccaccgctttcacggcttcatacaggcccgcgtcttcgcctgggtgaccggcagcggccatccagtttgcggagagcttaatacgtttgatatcgccaatctgcgtcgcggcgatgttggtcagcgcttcaccgaccgccagacgggcagaggccgcgaagtccagcagcgcgaccggggtgcgttcacccagcgccatcgcttcgccgtagtagctgtcgaggctcgcagtggttacggcgcagttcgccaccgggatctgccacgggccgaccatctggtcgcgggataccataccggtcacggtacggtcgccgatggtcaccaggaaggttttctctgccacagcaggcaggtgcagcacgcggttaacggcttctgccacggtgatgccctgacgatccagcgctttgcccgccgccttacgggtctgcacgtcgcgggtcatcttcggcgtttttccgagcaggacgtcgagcggcagatcgatcggctggttgtcgaaatgggtgtcactcagagtcaggtgctgctcttcggtcgcttcaccgatgacggcatacggcgcgcgctcgcggcggcacagctcgtcaaacagcggcagctgatccgccgcaacggccagcacgtagcgctcctgggattcgttacaccagatttccagcgggctcatgcccggctcatcgctcaggatgtcgcgcaggttgaaacgaccaccgcggccgccgtcgctcaccagctccggcatggcgttggacagaccgcccgcgcccacgtcgtggataaagaggatcgggttagcatcgcccagctgccagcagcggtcgatcacttcctgacagcgacgctccatctccgggttgtcacgctgtacggacgcgaagtcgagatccgcatcagactggcctgaggccatcgaagaggccgcaccgccgcccagaccgatgttcatcgccgggccgccgagcacgatcagcttcgcgccgacgacgatctcgcctttctgcacgtgatcggcacggatgttgccgatcccgcccgccagcatgatcggtttgtggtagccgcgcagctcttcgccgttgtggctgtccactttctcttcataggtacggaagtaaccgttcagcgccggacgaccaaattcgttgttaaacgccgcgccgcccagcgggccttcggtcatgatatccagcgcggtcacaatgcgctctggcttgccgaaatcttcttcccacggctgttcaaagcccgggatacgcaagttggagacggagaaaccgaccagacccgcttttggttttgcaccacgaccggtcgccccttcgtcacggatttcaccgccggagccggtcgccgcacccggccacggggagatcgccgtcgggtggttgtgggtttcaaccttcatcaggatatgcgcgggctcctgatggaagtcatagcgccctgcttcgcgatcggcgaagaagcggcccacctcggaaccttccatcaccgcggcgttgtctttataggcagacagcacgtggtcaggcgtttgctccatggtgtttttgatcattttgaacagcgactttggctgctgctcgccgtcaataatccagtcggcattgaaaatcttgtggcggcagtgctccgagttcgcctgcgcgaacatgtagagttcaatgtcgttcgggttacggttgagcttaacgaacgcatcctgcaggtagtcgatttcgtcttctgccagcgccaggccgagacgcaggttggcgtcgatcagcgcctgacggccctgccccagcaggtccacgctctgtaccggcgcaggctgatggtgggagaaaagcttctgcgcgtcatcaagagaggcaaatacgctctccatcatgcggtcgtgcagttcagccgcaaccgcctgccactgcgcgtcgctcagggtagaggcttccacgtagtacgccacgccgcgctccagacggttaatctggctcaggccacagttgtgggcgatgtcggtggctttggaagaccagggggagatggtgcccggacgcggcgtcgcaaggatcagtttgccggttggcgtatggctgctgaggcttgggccatacttgagcaggcgttccagctgtacgcgctcctctgcattcaggggggcattcaggtcagcaaaatggacatactcagcgtaaatattgcttaccggaaggtcggccgcctgaaaacgtgccagcagtttggtaatacggaaggcagacagtgcaggcgaaccacgcagaatttccatcataagtctctcgtcttcgaagcgccggggcgctttcagtgtgcgcaaggggggaaaacgggcgtcattatagagaatcctgagcgccgacgaaaccgtttgcgtcgaaataaaattggcaaagagatttaacaatagatgtgacctgtctctctaattggttgccaagtggcgcaagtttacgcaaaatgccgctcattcaatggcaaaccttattgttaacatggctacagcagactgaggcaaccggcgtcgcagagaattaactaattgaaaaaattaaagattaattatctgctcatcggcattctaacgttgctgttggcagtggccctctggccttccatcccctggatcggcaaagccgaaaaccgtatcgccgccattcaggagcggggggaattgcgcgtcagtaccctcaactctccgctgatttacagcgacatcaacggcaaaatcattggattggattatgaactggcacagcagttcgccgattaccttggcgtaaagctgaaaatcaccgtccgccagaatatcaaccagctgtttgacgacctcgataacgacgatgccgatatgctggccgccgggctggtgtataacagcgagcgcagcaaaaactatcagccgggcccgacctactactccgtttcgcagcagctggtttatcgcgtcgggagcctgcgcccgcgctcgctggcgtcgattaacgatcggcagctgacgattgcccccggccacgtggtgattgacgatctgcgcgagctcaaggagaagaaatatccggacctgagctggacggtggatgcgaaactcggcacgacggagctgctggagcaggtaaaagatcagaaagtcccctacaccatcgccgattcggtcgcgatcagcctgttccagcgggtgcatcctgaaatcgccgtggcgctggacgtcaccgacgagcagcctgtgacctggtttactcagctcgacgacgatcagaccctctctgccgcgatgctcgatttcttcaacaccatgaatgaagacggtacgctggcgcgcctggaggagaagtacctcgggcatggtgatgactttgactacgttgacacccgcagcttcctgcgtgcggtagacagcgtcctgccggacctgcagccgctgttcgaaaaatacgcccaggaaattgactggaaactgctggcggctatttcttatcaggaatcccactgggatacccaggccacgtctccgactggcgtacgtggtttgatgatgttaaccaaaaataccgcgctgagcctcggcgtcaatgaccgtaccgatgcggaacagagcatcagcggcggcgcgcgctacctgcaggatatgatggccaaagtcccggaaacggtgccggaagaggagcggatctggttcgcgctggcggcctacaatatgggctatgcgcatatgctggatgcgcgagcgctgacggccaaaacgaaaggcaacccggacagctggtcagacgtaaagcagcggctgccgctgctgagccagaagccatggtataacaagctgacgtacggctacgcgcgcgggcatgaagcctacgcctacgtggaaaatatccgtaaatatcagattagcctggtcggttatctgctggagaaagagaaagaggcgacagaggccaaacggctggcccaaagctaccctgtcgtggcgccggacgagcttaaccgtccgtcggcttcaattctgccttttgctgctttttctgctgacggcgcattcgaaagaaatcgcttaatagccccgaacactctggtgcaagcaccccgccgatagtctttacctggtggttcatccccgggtgacccagcacgtccatcagcgaaccggccgcgccggttttttcatcccgcgcaccgaagaccagagtcccgatccggctgtgcaccatcgccccggagcacattacgcacggctccagcgttacatacagcgtggtatcaagcaggcgatagttttgcagcaccagaccgccctgacgaagcgccatgatttcggcgtgcgccgtcggatcgtggcggccaatgggacggttccacccttcaccaatcacctggttattgtggaccagcacggcgcccacgggcacttcgccctcgtcccaggcacgctgagcgagcgttagcgcgtggcgcatccagtattcatgtgagaattcagggttggacaacggttgatactccagtcgaaaagcgggcggcattatacacaccccttatggataagactattcgagttgctgaagttcacctgatggcgtgacgcgccagcggtgctggcaaaaatagagcagcgggttgtcctgcttgctgtcgctgtagccgctgtacaggcgcagtggcgtgccgatacgtttttccagctggaccactttttcatgccccaggcagcgcatcgtcagcacccaaccgccgtagccgcgggcaatttgcgtggcgataagattcacgcgcggtagccagggggtatcaaagtagacctgctccaccagcgtctgcggggagccggtaatcagccagatgtcggcatcgttcgcgtcgagatagccggtcaggcgcgcctgcaccaccgggaatgcggcaacgtggccgcggaaccagtgcgcaaaatcctgctcgagctgtttgaggcgcgcttcgctgtgcccaaacgtacatccccacagcagcaggctcattggccatcgcgccgcacggcctttcaccagcagcgcgatcccgataacaggtaagagcggtagcacgagcagcgcattcagaggctgacgccgcagcaggtaacgcataaacgtaccaaacatatcctgctgatgcagcgtgccatccaggtcgaaaaagacaacgcgacgcccgtgatttgccaaaccttactcctctgggtcgttgaaacctaacagccaggtaaacaggaacccggcgatcaccgctactaaatagcctaacagatagagcaccacttttccggtcacgatggttaatgccagcggtaaccccgagagaccaaaggtgatgacggtggcaactttccagtagctgatcagcgccccgcctaccgcgccgcccagacaggccgcgaggaacggtttacccagcggcagcgtaacgccgaaaatcagcggctcgccaatgccgagcagtccgaccgggagtgcgcctttaatcatttttttcagacgcgcgttgcgggttttcatcagtaccgcaattgccgcaccgacctgccctacacccgccatcgacaggataggcagcagcgcgttatagccgtgcgcctgcaccagctcgacgtggatcggtaccagcccctgatgcaggccggtcagcaccagcggcaggaaagtacccgacagcaccgcgcccactaacaggccgccgcggtcaatcgccagcgacgcaccgtgggcaatggcttcagagatccaaccgcctaacggctggagggccacaatcgctacgctaccggtaatcagcgtggtcagcagcgggttgagaatcagctcgatggagcctggcagaaccgcgcgcagccgtttctcgatccagcacatcaggatgaccaccagcagcaccgcgatcaccccgccgcggcccggctggagcgcctcaccaaacagcgtaatctgcgccagctgcgggctggacaagatgcccgccatcaccccgcccatcgccagcgatccgccaaacaccttcgcggtattcaccccgaccagaatgttcatgatggcgaacaccgcgctgccgaagatcccgagaatccccagcaggttcggatactgcgtggcgaaatcccccacaatatccggccgcttgaggatattgatgatcccggtgatcaggcctgaggcaataaacgccgggatcagcggaataaagacgttggccagctgtcgcagcgcgtcgctcatgggggctttgtatttcgcctttgcctgggctttggtgcgctcagcatcgtcaatcgatacgctcgcactcacgcccatcagcgcgcgcatggcatcgacaacctgcgccgctttccctgggccgacgatcagctggtgctgctgcccctgtttcacgtagccgctgacgccggaaagctgcttcagacccggcacgtcgagctggtcgtcgtcatgcacctcgacgcgcacgcgcgtcatgcagttttcgagacgctgaatattttgttccccaccaatccctcgcaggataccgctggcgagcgctgctgttttgtccatacacgcctctgttagtgttctaatgccgcccgtaagaaaccgttatgcgcatcgagtttggctcttgcggccgccgcatccagcccgcttaagatcatcaaaatggccggtttaacatcgtgatcggtctgtttgagtaccgcttccgcctcttcgcggcctgcgcccgtcgcctccatcaccatgcggcaggctctgtccaccagcttgacgttggtggcctgcatatccaccatcaggttctgatacaccttgccgaacttcaccatcgcgccggtggagatcatattgagcaccagcttttgcgcggtcccggatttcaggcgcgtggagccggtgagcgcttccggcccgacaactggcgagatagcaattgtggccacctgcgcaatcggtgagccagggttgcaggagatggcgaccgtcgtacagccggtctggttggcgtattccagcccgccaatcacgtacggcgtgcgcccggatgccgccagcccgaccaccagatccttcgccgttagattaagatccttcaggtcatcctcgcccagctgtttgttgtcttccgccccttcaacggctttcaacagcgcaccggggccaccggcgatcagcccaactaccagaccatgcgggaccccaaaggttggcggacattctgacgcgtccaggacccctaaacgcccgctggtccccgcccccatgtaaataatgcgtccaccggtcttgagggcttccgcagccgcatcgaccgctttcgccacctctggtaatgtctctttcactgcctgcgcgaccagcgtatcctgttgattaaagcggttaaccagctccagggtggagagcgcatccagatccatggtttgcgggttacgtgtttcagaaacaagtgagccaagattcatttttgtacctcaagaatttttaattcataataatcacactataatggaatataaaattcattcaggcgagcaaaatccgtatttgcgcagataatcacattttcgccaggagaccgtatgaactgtttaattcgcattcgtcagcgctacgcaggctttgcccaaagcgacaagaagctggcggattttctgctttctcaacccgaccacgcgcgccatctcagctcgcagcagttggcgagtgaagccggggtgagccagtccagcgtggtgaaatttgcgcagaagattggctttaagggattccccgccctcaagctggcgatcagtgaagcgctggtcagtaaccctaacccgcagtccatgccggtgcataatcagatccgcggagacgatccgatgcggctggtcggcgaaaagctgatcaaagagaacgtggcggccatgcatgcgacgctcgatgtgaatacggaagagaagctgctggagagcgtggcgatgctgcgcggcgcgcggcggatcgttctgaccggcatcggcgcgtccggacttgtggcgcgtaactttggctggaagctgacaaaaattggccttaacgccatcgtcgagcaggatatgcacgccctgctggcgaccgtacaggcgatggatcctgacgatctgctgctggcgatctcctattccggcgagcgccgtgagatcaacatggccaccgacgaagtcctgcgcgtcggcggtaaaattctggcgatcaccggttttacgccgaatgccctacagcagcgggccacgcgctgtttatataccattgccgaggaacaggccacgcgcagcgcggctatctcgtccaccagcgcacaaatgatgctgacggacctgctgtttatggcactggtgcagcaggatctggagcgtgcgcccgagcgcattcgccacagcgaagaactggtaaagaaactggtttgacgcgtataatgcccgcccagtttgtgttgtttctgagaatttcctgatggcgctgttaattaccaaaaaatgcattaattgcgatatgtgcgagcccgaatgcccgaaccaggccatttcgatgggcgacagcatttatgagattaacagcgaccgctgcaccgaatgcatcggccactatgagacgccgacctgtcagaaagtgtgcccgatccccaataccatcctgaaggatccggcacacgtcgagagcgaagagcagctgtgggataagtttgttctgatgcaccacgcggacaaactttaactttcgatgatcaccgttgcgctggcatagtgacgctcatccgcgatcgtcacgtggacgtgattcacgccgagcttctctgccagcttttgcgcctcgccccataaacgcaggcttggcttacccagctcatcgttaaacacttcaaactggttgaacgccagaccgttacgaatgccggtcccgaaggctttggcggccgcctcttttaccgcaaaacgcttcgccagaaaacgcaccggctgctgatgcgcttcccagatggcccattcgttatcgctcagcacgcgccttgcgaggcgatcgccgctgcgggcgatcaccgcttcaatgcgggctatttccacgatatcggtgcctaagcccagaatggccattactgacgcgcttccagcatcaggcgtttcatttctgcgaccgcctctttcaggccgctcatcaccgcgcgcccaatgatcgcgtgaccgatgttcagctcgtgcatttccgggatggcggcaatggccttcacgttatggtaggtcaggccgtgaccggcattgacctttagacccaggctcgccgcgtaggtggccgccttagcaatacgctccagctctttcgcctgctcggcatcgtttttggcatcggcatagcagccggtgtgaatttcgatatacggcgcgcccacgtcggctgccgctttaatctgggtgaaatcggcgtcaataaacagcgaaaccaggataccggcatcagccaggcgcttgcaggcatcgcgcattttgtcgagctggccggccacgtccagaccgccttcggtcgtgacttcctggcgtttttccggcaccaggcagcagaagtgcggctgggtctcacaggcaatcgccagcatctcttcggtgactgccatctccagattcatacgggtgtccagcgtctgacgcagaatgcgaacgtcgcggtcagtgatgtggcgacggtcttcacgcaggtgaacggtaatgccgtcggcgccagcctgttcagcgataaacgccgcctgaaccggatcgggatacgccgtgccgcgcgcattacgcagcgtggcgatgtgatcgatgttgacgcctaacagtaattcagccatgacaatcctcggtattttggttcatttccctccccctctccctccgggagagggctggggtgagggggaaaaacgttaacgtttcggcacaaactgcctgaataattcgcggctctttaagggcttgccgccaagatacggcttgagggcaatccgggtaaagcgttttgctgcgcgcagggtatccagatcgggaaactcgcgctcataaagcgccctgagctgacgcccggtaaaggtgctgttgtcgatcacgacgctggcaatgaagcctttttcttcacggtagcggtaggtcatggtgtcttccacttcgtcaccgctgcccgcacagtgcagaaaatcgaccccgtacccaagatggcccagcagcgccagctcaaaacgccgcagcgcaggctcgggcgtaccggttgcgccagccagcgcctggatacagtgcagataatcaaagaaaagttcagagaagcgggtctcatgttcaagaacgcgagagatgagttcattgacatacagaccgctatagagcgtgatgcctgagagaggaagcgccagggagacggcttcggcgctgcgcagggttttgacttcccctcgcccaccaaagcggaccagcaacggcgtgaaaggctgtaaggcacctttcaggttagaacgtttggaacgtgcgccttttgcaacaaggcgcacgcggcccgactcttccgtgaagacgtccagcatcaggctggtttcgctccagggacgactatgcaggacaaaggcgcgctgccatccatccatatgctcgtcgtcttgtgttactggtcttcgccgtaaccgaggctgcgcagagcacgctcatcatcggcccagccagatttcactttcacccacagttcaaggtgaaccggcgcttcgaacatctcctgcatgtcctttcgggcttcgatgccgatggttttgatcttggcgcctttgttgccgatcaccatcttcttctgcccttcacgctcaacgaggatcaggccgttgatgtcgtagccgccacgctcgttgctctggaaacgctcgatctccaccgtcacagagtacggcagttcagcgcccaggaaacgcatcagcttttcacggataatttcagacgccataaagcgctgagagcgatcggtgatgtactcttccgggaagtgatgaatcgcttccggcagatgtttgcgcacgatgcccgcgatagtatccacgttcagacccgtctccgcagacagcggaacgatgtcgaggaagttcatctggctaccgagccactgcagatgcggcagcagatcggctttttcctgcacgttgtcaactttgttgacggcgaggatgaccggcgttttgccgtcgcgcagcttgttcagcaccatctcgtcgtcaggcgtccagcgggtgccttccacaacgaaaatcaccagctccacgtcgccaatcgagctgctcgccgccttgttcatcagacggttgatggcacgcttctcttccatgtgcaggcccggggtatcgacgtagatcgcctgatacgcgccttcagtatggataccgacgatgcggtgacgcgtggtctgcgccttacgcgaggtgatagaaatcttctgcccaagcagattattcaacaaggtggatttgccgacgttcggacgtccgacgatggcaataaatccgcaataggtcttttcttcgctcattccagctccagcatttttaacgcctgttcggcggcagcctgttcagccttacgacggcttgaacctgtgcccaccaccggttcactcaggccactgacctggcaatggatggtaaattcctgatcgtgcgcttcgccacgaacctgcaccaccagataagatggcagcggcagatgacggccctgcaaatattcctgcagacgcgttttgggatctttttgtttatcgcccgggctgatttcgtccagacgggtctgataccagttcaggatcagcttttcgacggtctggatatcgctgtccaagaacacaccaccaattaatgcttcgaccgtatcggcaagaatagattcacgacggaagccgccgcttttcagttcacccggcccaagacgcagacattcgcccagctcaaattcgcgcgcgatttccgcaagggtattaccccgaaccagcgtggcacgcatgcggctcatatcaccttcatccacgcgcgggaaacgatgataaagcgcattcgcaatcacgaaacttaaaatagagtcgcctaaaaactcgagacgctcattatgtttgctgctggcactgcggtgggttaatgcctgttgcaacaactcctgatgatgaaaagtgtagcccagcttccgttgaagccgattaattacgatggggttcatgcgataccaataaatgaatgcgtcaaaaatgcagcacacgaaaccgacctgagaaaaccaacgcggtttcgtgtgccgtggcacccttgcagggccaaccttaaacttcgggggaatattctatacacaacgacaggggatgtcgttagttcgaagagatttatcggtgaaataattcatgtagccgcgttaattcgcggctacacgttcatttagtgagaattaatggattccgccaatacgattcaggcgtacaccggtcggccattcgccttcctgcttctcaaaactcatccagattgcggtcgctttacccaccagattcgcttccggcacaaagccccagtaacggctgtccgcagaattatcgcggttgtcacccatcatgaagtaatggcctggcggtacaatccagcttgccagctgctggcccggctgacgatagtacatacccacttgatcctgcgcgattggcacggtgaggatccggtgcgtcacgtcacccagcgtctctttgcgctcaaccagacgaataccgttatctatggtttcacctttcggtacctggaagaatccgctgctcgcttcgccgccgttgtgacgggcaaaggtctgcacaaaatcacttggctcaacgttcgagtaagtgattggcagcgcgttttcacatgcagtaccggagctgcagcctggctgaacggtgacttctttcgcaaccggatcgtaagtcactttgtcacccggcagacctaccgcgcgcttgatgtagtccaggcgcggatcttccggatatttgaacaccacgatgtcgccacgtttcggatgaccggtttcgatcagcgttttctggtagatcggatctttaatgccgtaggcaaacttctctaccagaataaaatcaccaatcagcagcgttggcatcattgaacctgatgggatctggaacggttcgtaaataaacgaacgtaccaccagcacaatcgccagcaccggaaacaccgaggcgcccgtttccagccagcccggtttcggaccgactttcttcagggttttcgcgtcaataccatcgccagtggctacctgtgcggcagcctgacgttcacgacgttttggggcgaagataaacttatccagacaccacagcagacctgtcaccagggtagcaatgaccaggatcagggcaaacatgttcgccatgccaactccttagggttatttgccgtctttaccaacatgaaggatggcaaggaatgcttcctgcggcagctcgacgttaccgacctgcttcatacgcttcttaccttctttctgcttctgtagcagctttttcttacggctgacgtcaccgccatagcacttcgccagaacgtttttacgcagctgtttcacggtagaacgcgcgataatgtggttgccaatggccgcctgaatcgcgatatcgaactgctgacgcgggatcagatctttcatcttctcaaccagctcgcggccacggtatggcgcattgtcgttgtgggtgatcagcgccagcgcatccacacgctcgccgttgatcagcacgtccacacgcaccatgttggaggcctggaagcgtttgaagttgtaatccagtgacgcatagccacgggaggtggacttcagacggtcgaagaagtcgagtactacttccgccatcgggatttcgtaggtcagtgcgacctggttaccgtggtaaaccatattggtctgcacgccgcgcttctcaatacacagcgtaatgacgttaccgaggaattcctgcggcagcagcatgtgacattcggcaataggctcacgcagctcgtgaatattgttcagcggcggcagcttggacgggctgtcgacgtagatcacttctttcgaggtggtttcaacttcatacactaccgtcggcgcggtggtgatgaggtccagatcgtattcacgctccagacgttcctgaatgatctccatgtgcagcaggccgaggaagccgcagcggaagccgaagcccagcgccgttgagctttctggctcgtagaacagggaggcatcgttcaggctcagcttgccaagcgcatcacggaagttttcgtagtcgtcagagctgaccgggaacaggcccgcgtaaacctgcggtttcacctttttaaagcctggcagcgctttttctgccgggttacgcgcacctgtcagggtatcgcccaccggcgcaccgaggatgtctttgatggcgcacaccagccagcctacctcgccgcatgtcagctcggtacggtcaacctgttttggcgtgaagatacccagacggtcggcgttatagacctgtccggtactcataaccttgattttgtcgcctttgcgcatggtgccgtttttaatacgcaccagggagacaacgcccagatagttatcgaaccaggagtcaataatcagcgcctgcagcggggcatccggatcgccttccggggccggaatatcacgtaccagacgttccagaacgtcggtcacgccgacgccggttttcgcagagcagcgcacggcatcggtcgcgtcaataccgacaatatcttcaatctcttccgcgacgcgctcaggatcggcggctggcaggtcaatcttgttcagaaccggcacaacttcgagatccatttccatcgcggtgtagcagtttgccagggtctgggcttctacgccctgcccggcatcgactaccagcagcgcgccttcacaggccgcgagcgagcgtgaaacctcataggagaagtcaacgtggcctggggtgtcgataaagttcagctgataggtttcgccatcagccgccttgtaatccagcgtgacgctctgcgccttgatggtgataccgcgttcgcgttccaggtccatggagtccagaacctgggcttccatttcacgatcagacaggccaccgcaaatctggataatacggtcagacagcgtcgacttaccgtggtcaatgtgagcaatgatcgaaaagttacgtatgttcttcatatagttaaataattatgccttacgaattcctggaggccgctgttcttagcctgacgtttttcagtgcgaaaacgcagcattctacactacatctccgctacctggaaatggacttagcgccaggtatagcgtgaagaaaggacgttttctgttttaagacgtaaaaatgacaaagcccgatgaatcaccgggcctcagaagagagcgtctcaacgcgaagctggtctggcgccagcccaacgctgagaatgacaggctgccactcctcgcgcgcggcaagcgtcggggagaggcctttggcaagccagaatccccccagcccccctaatgcggcaccgcacatggcggcaccgtcggtgccaaacagcatctggaaaacgccgcccatgataaacagcccgagcagcggagagagatagaccagcatggcggagctgagcagactgccttccgcgatgccgagttcaactttctgcccggccatcagcggctgttcgctcggcacagaaatcgtgtgcgaggtttgcggcccgagcttattcagcacgcggctgccgcaaccggctcgggatgcgcagctattgcatgaggcttttacatcgcagctcaccagcgcaatgccgttttgccacgagactaccgtcgcccattctttgatcattgtgcggccctgaatttaatgctgtcggagatgcgcttcgccgtttgcggaggaagttcccccacaatggtgatctctgcattatcgcgtaccgttgtgctcaccgtacggcgcccggtacgcagaatttgttcagtgctgtttgccgttgcgcgattgatattcaccgagaagctgaacaaaccatcggaatagaggcgtgattccaccggcgtttcaatcgttggcagctggcgacggctgctggacacttcgctaaatccttgcgggatccaggcaggtacccagttgaaattaacggaatcgcctgccggaacggagagcagcggcggcaggctggccttagccagattctgcatgctgttgccaacctggttattcacgctaaaggagataacgcggaactgttccaacgtttcaccgtcacggtcaagcaggtctacacgcatggggagtttggtttccgcgtcaatccagacaatatagctgtagcgcgttccatcccgggcgacaacgcggatcacctcacacagtctgtccgcaatacgcgtacgccctaccgaaataaaatcgtagtaaggggcaagccgtttgaagtcggtgtaaatgagtgacggcagggaatcaacgatatagtcgccattgagcgtgaaaggctccaggccgggttcgaaatagctgatttcgttaccacgctggacaacttcccgacgcgggccatccatctgtaaaagctgggcgagcggctgattatcaagacgggcatggcgatagcgtaacgactcgacgccctgcttattgatgctgataaatgccaactcgtaattgagtgactggctggccagattcatttgctgcaacaacgccccggatgatacatcagccgaggcgttggcagagaagaacaggctacccgccatcagagacatggcgaaccaaagttgcttcattactgcgattgcgttcctaaagtttggtttccgggcacctgcacagcagcttgctgtgtctgcgcctgctcaaactgaagctgttcagagtgcagacgacgctgcaactcgtaatcctgcaacatcgcattaatgcgacggcgctgctcctgaacctgctgttgctggccgccgctggcggaagcatcagccggtacgcccaggcttaccgggctggctttgcccatcatcggcagtgtgttaaacactggcgcttctggctgctgattagtttcagactgagtattatagtgctggacgccaacgataactgcaagcgatacgcatgcagccacacccatttgggtaagctggctggcccacggacgcaccttttgccagaatggcattttctgccactggtgaggtgcgggttgagcttcaggaatcagcggagtggtctgatgaacaggctcattctcaatcgccgccatgacgcgggctgagatatcgaaatggagaacctcgccggtgtcaccgcgaagggtgtcacggatgagatggtaactctcccaggtctcttgcatttcgggagaatgagacagctcgttgagcagctcactatccaccgtttcaccatccattaaagcggaaagtttttctttctgcatgcctaataccttttccagtatcccgctatcgtcaacgcctgataagcggttgaactttattatcaatagcttctcgcgcacggaaaattcgtgaacgtaccgtgccgaccggacaatccatgatagcggctatctcttcatagctcagaccatccagctcccgtaacgtaattgccatgcgtaaatcttccgggagcgactcgatcgtgcgaaaaacgatttgtctcagttcttctgacaacattaagttctcagggttcgaaatttctttcaatgcgccgccactttcgaagttttcggcgtcgattgcgtccacatcactagaaggcggacgacggccctgagcgaccagataattctttgccgtattgaccgcaatacggtacagccaggtataaaaagcactatctccccggaacgaatccagcgcgcgataggccttaataaaagactcttgcaccacatcaggcacatcacctgacggtacatagcgggaaaccaggctcgccaccttatgctggtagcgcaccaccagtaagttaaaggctttctgatctcccttctggacccgttcaaccaggacctggtccgttaactgctcgctcatccgaggtaatgtctccccaaacctaaattccacgcgttatcgaaacgccactctaaaaataccgcactttgagcaagcaccgaattagagtgtctgatcttcaataagttccgtaacgcctttgtttttgttcatcgcgccgcagactgttcattttctctcattataagtctgttcacgatacgcaccactttctgacaagaaacatctttttcccgccagaagagtaacgcaacccagtctttatttcatcacaaaatctgacgctaacgatctgcttcgcaaaataatttcactcatttaccctccgtttacctccgcttacgcgtttagccattgcaacacccgttaaaaaaaacgtgcgataaatcgcattcaggtgctattctgagccaacactgtttagtaaattaaacaacaatcatgaacacaacacctgaactccattgtgatgtactgatcatcggcagcggcgctgccggtctctctctggcgctacgcctggccgagcatcaaaacgttatcgtgctgagtaaagggccgataagcgagggttccacgttttatgcccagggcgggattgccgccgtgtttgatgagacagacagcattgcctcccacgtcgacgatacgctgattgccggggccgggatcgtggatgcgcacgccgcagagtttgtcgccagcaatgcccgccattgcgtgcagtggctcatcgaccagggcgtcttattcgatacgcaggttcaacccaacggtgaagagagctatcacctgacgcgcgaaggcggccatagccaccgccgcatcctgcacgcagcggatgccaccggaaaagaagtggagaccacgctggttggcaaggcgctgagccatcctaatattcgggtgcttgaacgaagcaatgccgttgatctgattatctccgacaagattggcctgccgggcacgcgtcgcgtggtgggcgcctgggtgtggaaccgcaataaagagaaggtggaaacctgccaggcgaaggctgtggtgctcgccacgggcggcgcctctaaagtgtatcagtacaccacgaacccggacattgcctccggagacggtatcgcgatggcctggcgcgccggctgccgggtggcgaatcttgagtttaatcagtttcacccaaccgctctgttccatcctcaggcgcgcaacttcctgctgacggaagccctgcgcggcgaaggcgcctatctgaaacgccctgacggcactcgctttatgccggactttgacgcccgtggcgaactggccccgcgcgatatcgttgcccgcgccatcgaccatgaaatgaagcgtcttggcgtggactgcatgtatcttgatatcagccacaagccagcagagtttattcgtcagcacttcccgatgatttacgaaaaactgctcaaccttggcatcgatttaacccgcgatccggtacccattgtgccagccgcccactacacctgcggtggggtgatggttgacgatcatgggcgtaccgatgtggatggtctttatgctattggtgaggtcagttataccggccttcacggcgcgaaccgtatggcctctaactcgctgctggagtgcctggtctacggctggtcggccgcagaagacatcacgaaacgcatgccctacgcccgcgaaacagagtgcctgcctgtctgggatgaaagccgcgtggataacccggacgagctggtcgtgatccagcacaactggcatgagctacggctgtttatgtgggattacgtggggattgtgcgcaccacgaaacgtctggaacgcgccttgcgccgcatcactatgctgcagcaggaaattgacgagtattatgccaatttccgcgtatcgaataatctgctggagctgcgcaacctggtgcaggttgccgagctaatcgttcgctgcgcgatgatgcgtaaagagagccgcgggttgcactataccctggactacccggatcagcttgctgaatccggcccgtcgatcctcgccccgcaggtttacataaacagataaaacgcctgggtcagggcagtgtaatcttcggaataacgctggtctggcccacggatcaccattcgatcgttaaagcattccccctctttcggcgagagcgccagcagcacgcggtgcggcagtcggccttccgtatccgaaatgtcggtacgcagacgtaacgtccagccgatctcctgcgcgataccgatgaacgtgttgcccgtactctcaggcaggaccacgcagaaaaaaccctcttcggagataagctcggccgcgctggtgagcagcgctttatgatcgagggaacgggtataacgcgcctgttcgcgctcgggtgtcccgcactcaacgccgggctcgtagtagggagggttgctgacgatcaaatcgtaacgcgcggtttgttcaggcgcccaggcgagcacatccgcacattccactttcatgcgggctgcccagggcgattcggccatattgtcactcgcctgctctgccgcctccgcgtccagttcgacggcatcaatggtgacatgctcgtccgtgcgctgcgccagcatcaatgccaccagcccgctgccagtaccgatatcaagaatacgcttaacccctgcgacaggcgcccacgctcccagtaaaataccgtctgtaccgaccttcatggcacagcgatcgtgagcgacaaaaaattgtttaaacgtaaaaccatcgcggcgcagttgcgctttgagttgagacatgtcggggcaaccttctaagtgaaactggagtagcataggggaaagcgaagtggccgaaaagcgatatccgtacaaacagatgaagattacagccgtaacgtctataatcagcgccccacacagaggtagaacatgactgtaacgactttttccgaacttgaactcgatgaaagcctgctcaatgcacttgagagcaaaggcttcacacgcccgaccgccattcaggcagcggccattccgcctgcgcttgagggccgcgatgtgctcggttctgcgccaaccggtacggggaagactgcagcctatttgctgcctgtgttgcagcatctgctcgacttcccacgcaaaaaatctggcccgccgcgtattttaatcctgacgccgacgcgcgaactggccatgcaggtggccgatcacgcgcgtgaactcgcggcaaatacccatctggatatcgctaccatcaccggcggcgttgcgtatatgaaccacgccgaagtgttcagcgaaaaccaggacatcgtcgttgcgacgacaggccgcctgctgcagtacattaaagaagagaactttgactgccgcgcggttgaaacgctgatcctcgacgaagccgaccgtatgctggacatgggcttcgcacaggatatcgagcatattgcgggtgaaactcgctggcgtaaccagacgatgctgttctctgccacccttgaaggggaagcgattaaagacttcgcagagcgtctgctgaaagatccggtagaagtgtcggcgacgccgtccacccgtgagcgtaagaagatccaccagtggtactaccgcgcggacaaccttgagcacaaggtcgaattgctcaaacacctgctgaagcaggaagatgcgctgcgcacaatcgtgtttgtgcgtaagcgcgagcgcgtgcacgagctggcagaaatgctgcgtaacgccgggatcaacaactgctatctcgaaggcgagatggcgcagatcaagcgtaccgaaggcattaagcgcctgaccgatggccgcgttaacgtgctggttgccacagacgtggccgctcgcgggatcgacattccggacgtcagccacgtcattaacttcgatatgccgcgcagcggcgatacctatctgcaccgtattggccgtaccggccgcgcgggccgcaaaggtattgcgatttcactggtcgaagcgcatgactacctgctgctgcagaaaattggccgctatgttgacgagccgctgaaagcgcgggttattgatggcttgcgcccaaccacacgtgcgccgagtgaaaaaatgacgggtaaaccgtccaagaaagcgctcgcgaaacgtgctgagagaaaagagaaagaaaaagagaaaccgcgcgtgaagcagcgtcaccgcgataccaaaaatattggtaaacgccgtaagccaagctctgccgcatcagagacaaaaacggaagagtaaaaaaaagccggggacaatccccggcttttttattcacccccgtagctgaagccttacaggctttcagtaaaggtacgcgcgataacgtcgcgctgctgttctggggtcagagagttgaagcgtaccgcataaccagacacgcgaatggtcagctgcgggtatttttctgggtgctcaaccgcgtccatcagcgtttcgcggcgcagtacgtttacgttcaggtgctgaccaccttccacgcgcacttctggcttcacttccattggaatttcacggtactcgatttcgcccagtttgctcaccggcacgatttcatcttcagcaaaacccgctttcgcgacgacacagcgcgcttcgtttttctcgctgtccagcagccagaaagagttgagcagatcgtcatttgcagctttagtaatctggatacctgtaatcatgtgttgcctcccttaggctacattaactgatgccggcctctcgcggccaattggtaaaaccattgtttcttgtgtgtatatatatcattcacaccccggtgatttattgatttaaatcaacaaaaacaccaaccacataaagagtgtggtttgagtttattgttttagatcaattttacgaccttaccaattcaatttaccctgcacattttcaacataaatttagctacttagcgcacatttcggcgtggaattttgctcaccgggctttagcaggtaagctagtcagagattgagattcgcaggagagcgagatgacgacacctttaacctggcatgacgtgctggcagaagaaaagcagcagccctattttatcaatacgctcaacaccgttgcggctgagcgtcagtccggacagacgatttacccgccgcagaaagatgtgttcaacgcctttcgctacaccgagctgagcgatgtgaaagtggtcattctgggccaggatccctatcacggtccgggccaggcgcatgggctggcgttttccgtacgtccgggcgtggcgatccccccttctctgctcaatatgtataaagagcttgaaggaaccgtgcccgggtttacccgaccaagccacggctacctggaaggctgggcgcgccagggcgtgctgttattgaacacggtactcaccgtacgggccggccaggcgcactcgcatgccagcctgggctgggagacgttcaccgataaagtcatcagcctgatcaacgaacaccgtgaaggggtcgtgtttttactctggggatcgcatgcgcagaagaaaggggcgattattgaccgccagcgtcatcacgtgttgaaagcgccgcacccgtcaccgctgtctgcacatcgcggtttcttcggcagtaatcattttgttctggcgaacgaatggctggaaaaacgtggcgaaacgccaattgactggatgcctgtgttaccggctgagagcgagtagtatttgaatgtgccgggtcaggcccggcacatgaagaggcttatgccttattctgacgccaccattcggccagcagtacgccggttgcaacggatacgttcagactttccacattgcctgtcccatcaattgagacgctcagatctgcactggagagcgccgcatcagacagaccatcgcgttcctgacccagcaccagcaccatcttgcgtggcagcgtcgctttaaacagcggcgtaccggcatggctcgaggtagtcacgatggaataacccgctttgcggaactgctcaagggcatccagcacgctgtcgtcggtgatcggctgtacgtgctcggctccgccttccgcagtacggatcgcagcgccggattccagcagcgcggcatcctgcagcagtacgcctttcacgccaaagtgcgcgcagctacgcatcattgcgcccaggttatgcgggttgcccacatcttccagcgccagcacgcagtcatcggcatccgcctgactgacccactgctgaacggtggtgccgttacgttttttgatcaggaagcagacgccgccgtggtgttcggtaccggatgctttggtcagctcggcatcatcaaccacgtggtaggctttgcggtttgccgccatccagcgcagcgcttctttaaagcgcggggttacgctctggatgaaccaggcgcggacgatacattcaggacggctctggaacagcgcctggcaggcgttctcgccatacacgcgggtctcttccgcacgctgacggcgcagcacttccgggtcgataaagcttttaccgctgataccgccgtgatcggccttttctggcgtttcgtcgccaggtgcacgagaaacggtgcgccacggggaggcgttatcacgtgagaagtcatcccgcggacggtcatcgcgtttgcgatcgtcacgcttgcggtcatcacgtttgcggtcatcaccgcggttgtttctgtcatcgcgggcggggcgacggccaccgtttgcacgagaagacgccggacgcccgccaccttttccggtacgcggattttgggtgcgtttatcagagtcatcatcactgcggacatacatcactttgaccttgccgcttttgtttttcatttcgtcgttcatgcttttctccaccagcgctgcgcgaagcgcgcagattacccgatgtgccagcgcatagccataatttcgtacaaaagcctgtgactattgttctcattgaataaaacgcattgttgtttcaaacaggctcattgataatatgtaacatattagaaacattaccggcgtcttgccgctgtcccacggctctatcagaggttagttatgaataccgtatgtgccaactgtcaggctcttaaccgcattccggacgatcgggttgaagatggtgcgaaatgcggacgttgtggccatgaattgtttgatggcgatgtcattaacgcgacgggtgctacgctggacaaactcctcaaggacgatctgcctgtcgtagtggatttctgggcgccctggtgtggcccatgccgaagcttcgcgccgatcttcgaagacgtggccgaagaacgcagcgggaaaatacgtttcgttaaggtcaataccgaagctgaacctgaactgagcgcccgttttcgcattcgcagcatcccgacgattatgattttcaaaaagggtgaagtggtcgacatgctcaacggtgcggtgcctaaagccccgtttgatagctggcttaacgaatcactgtaacattcacggggcacatcttgtgccccgttcccgcctctgcgaaaatagggtttttcctgcatttcgcccatgactgataacgctgttcttcaattacgcgccgaacgccttgcgcgcgccacccgtccgttcctcgcgcgcggaaaccgtattcgccgctgtcagcgttgcctgctgccgctgaaggtttgcctgtgcgagacgctgaccccgagttcggcacagagccgtttttgtctggtcatgtttgataccgagccgatgaagcccagcaatactggtcgcctgattgccgatattctgccggataccgcggcgtttcagtggtcccgcacggagccccctcaggccctgctcgacttagtggcaaaccctgactatcagccgatggtcgttttccctgcgtcatatgcaggtgtcgatcgccaggtgctttcgacgccgccatccggtaaaccgccgttgtttattatgctggacggcacctggaccgaagcgcgaaaaatgtttcgcaaaagcccgtatctcgacgcactgccggtgatttctgtcgatctttcccgcgtctccgcctaccgtctgcgtgaagcgcatgctgacgggcaatactgcaccgccgaagtggccattgcgcttctggatctggcgggtgataccgctgcggctggcgccctgggcaaccatttctcctgtttccgggaacgctatctggcaggaaaaaccgttcataagggcagcgtcacagcagccgagacggaaagcgtttaaaatcatcaggtcgcttgcattcacaggaggcctgcatgagccagcgagggttagaagcgctacttcgtcctaaatccattgccgtcatcggcgcatcaatgaaaccggatcgtgctggctatctgatgatgcgcaacctgctggccgggggatttaatggtcccgttatgcccgtcacgccggcgtataaggcggttcagggagtgcttgcatggcctgatgtacagagcctgcctttcgtaccggatctggccgtactgtgtacaaacgcgaaacggaatccggagctgctggaatcgctcggcaagaaaggctgtaaaacctgcattattctctcgtctccgcctgaacagaaagccgagcttctggcctgcgccagccgctatcaaatgcgcattcttgggccaaacagtctcggcctgctcgccccctggcagggcttaaatgccagcttctctccggttccgatccgcaaaggcaagctcgcgtttatctcgcagtcggctgcggtatcgaacaccatcctcgactgggcgcagcagcgtgaaatgggattctcctacttcattgctctcggcgacagtctggatatcgacgttgatgagctgctggattttctggcgcgcgacggtaaaaccagtgcgattctgctttatcttgagcacctcagcgacgcgcgtcgttttgtctcggcgtcgcgaagcgcgtcgcgcaataagccgatcctggtaatcaaaagcgggcgcagccctgcggctcagcatctgctgcagtcgcattccggcatggatcccgcctgggacgccgctattcagcgcgcgggtttgctgcgggtacaggatacgcacgagcttttttccgccgttgagacgttaagccatatgcgcccgttgcgcggcgagaagttaatgattgtcagtaacggcgccgcccctgccgcactcgcgctggatgagctgtggcggcgcttcggcaagctggccacgctgagtgaagagacgctgcagcgcctgaaagatgcgcttccgaccagcgtgacgcccggcaatccgcttgatttacgcgatgacgccagtagcgaccgctatatcagggccatttccattttgctggatagccaggatttcgacgcgctgatgattattcactcccccagcgcggtcgcgccgggcagcgaaagcgcgcgcgcgctcattgaggccgtgcgcaatcatccgcgaggcaaatatgtcaccctgctcaccaactggtgcggtgagttttcttcgcaggaggcgcgacgcctgttcagcgaagccggactgccaacctaccgcacgccggaaggcaccataaccgcgtttatgcatatggtggaatatcgccgcaaccagaaacagctccgtgagacgccggcgttgcccgggaatttgacggccaataccgttgacgttcaccggctgttgcagcaggcgattgaagaaggcgcgacgtcgctggatacgcatgaagtccagcccattctgggcagctacgggatgcagaccctgccgacctggatcgccagcgacagcgctgaggccgtacatattgccgagcagattggctatccggttgccctgaagctgcgttcgccggatattccgcataagtctgacgttcagggggtgatgctctacctgcggacggcggcagaggtgcagcaggcagccgatgccatcttcgatcgggtcaaaatggcctggccgcaggcaaggatccacggcttgctggtgcaaagcatggctaaccgcgcaggcgctcaggagttacgcgtggtggtcgaacacgatcccgttttcggcccgctcatcatgctgggtgaaggcggcgtggagtggcgcccggaggagcaggccgtggtggcgttaccgccgctgaacatgaacctggcgcgttacctgatcatccaggcgattaaaagcaaaaagatccgcggccggagcgcgctgcgtccgcttgatattgccgggctaagtcagttcctggtgcaggtctctaacctgattgtggattgcgccgagatccagcggctggacattcatccgctgctcgcctccggcaatgagtttacggcgctggacgtgaccctggatatcgcgccctttgaaggagacagagagagccgtctggcgatccgcccgtatcccctgcagctggaggagtgggttgagatgaaaaatggggaacgcgccctgttccgccctattctgccggaagatgagccccagctgcgggcctttatctctcaggtcacgaaagaggatctttattatcgctattttagcgaaatcaacgaatttacccacgatgatttagccaatatgacccagatcgactacgatcgagaaatggcgtttgttgccgttcgtcgcgccgatgagggtgatgagatcctcggcgtcacgcgtgccatttctgacccggataacgtcgatgcggagtttgccgtgctggtgcgctccgatcttaaaggtctgggcctgggaagacgactgctggaaaaactcatcagttatacgcgagatcacggattgttacgccttaatggcattactatgcctaacaatcgcggtatggtgaccctggcgcgaaaacttgggtttgacgttgatattcagctggacgaaggtattgttgccttatccctcagtctgacatcagcagacaaacgcgagtaagctactggaaatgttacccactttggacgggactggtggtatcattgtccgcttatgttgtttgcatagtacagacaacccttcaatgaacagagaagaaacgcactgtgatgttgtcaaaatttaagcgtaataaacatcaacaacaccttgctcaactaccgaagatttctcagtcagttgatgatgtagagttcttttacgctcccgctcattttcgggagacgcttctggaaaagattgccagcgccacgcgacgcatttgcattgtggcactgtatcttgaacaggatgaaggcgggcgcgcgatcctgaacgcgctctatgaagccaaacgtcagcgtccggaactggatgttcgcgtgctggtagactggcatcgcgctcagcgtggccgtattggcgctgccgcatcaaacaccaatgctgactggtattgccgcacggcgcaggaaaatcctggcgttgacgtgcctgtttatggcgtcccggtgaatacccgtgaagcgctcggcgttcttcatttcaaggggttcatcattgatgacagcgtgctatacagcggcgccagcctcaatgatgtctaccttcatcagctcgataaatatcgctacgaccgctaccatctgatccgtaatccgcagatggccgatatcatgttcaactgggttgataagaatctggttcatggccgtggcgttaatcgtcttgacgatcccgagcgtccgaaaagcccggagatcaaaaacgatgttcgcgccttccgccaggagctgcgcgatgcggtctatcatttccagggagatgcgaacaacgaagagttatccgttaccccgctggtagggctcggcaaatcaagcctgctgaacaaaacgattttccatctgatgccgtgcgcggagcagaaactgactatctgcacgccgtatttcaaccttcctgccgtgctggtgcgtaatatcattcagctgctgcgcgagggtaaaaaagtggaaatcatcgtgggtgataaaacggcaaatgacttcttcattcccgaagatcagccgttcaaaatcattggtgcgctgccttatctctatgagattaacctgcgtcgtttccttagccgcttacagtattacgtcaacactgaccagctggttgtgcgtctctggaaagatgaagacaatagttaccatctcaaaggcatgtgggtcgacgatgagtggatgctgctgacaggtaacaacctgaacccgcgcgcatggcgactggatctggaaaacgctatcctgattcatgacccgcagcatgagttagccgcccaacgtgaacgcgagctggagctgattcgcacccatacgaccgtcgtgaatcactaccgcgaactgcagagcattgccgattatccggtaaaagttcgcaagcttattcgccgcttacgtcgtatccgtatcgaccgacttatcagccgtattctgtaatatccaggcccagtcacccgcagggcttttttatggagcccgttgatgcgtattcctctggtactgagtgtgctcttcctgagtggctgtagccatatggctaacgatagctggtccggacaggacaaagcacagcatttcctcgcttccgcgatgttgtccgcagccggtaatgaatatgcccagcaccagggatacagccgggatcgtagcgcggcgatcgggttaatgttctcagtaggtcttggggcatcaaaagaactgtgggatagccgccccgcagggagcggctggagctggaaagatttcgcctgggatgtcgccggcgcaacgaccggctatgccgtatggcagatggcgcgatattaaagtcgaatgcctttccctttgcgatgcagcatcagggagacaacaaacgccagtgcccccattcccgttacgtaccagaagaatgtcgtttcgcttccccatgatttaagcgacagcgcgacgtactccgccgatccgccaaacaccgcgttggctaccgcataagagagccctacccctaacgcacggacctgcgccgggaacatctcggctttcagtatcccgctgatggaggtatagaaactgacaatcaccatcgccaccatcaccagcgcaaaggcggcatacggtgaagagacatgctgaagcgctgtcagaatgggaacggtacataatgccgataatccgccaaaaatgagcattgaggtacgtcggccaattttatccgagagcgcaccgacgatcggctgtatgagcataaaaacaaacagcgccgcagtcatgaccacactggcgacgtttgcgtgcatgccggtggtattcaccaggtacttttgcatataggtggtgaaagtataaaaactgagagagccgcccgcagtgaagccaagaaccatcaggaaagctttgcggttacgccataaccctttgaatgttcccgcctccttcagcatccggacctctttctgagaggtttcatctaactgacggcgtagccaaagtgcgacaatcgccagcactgcccccattgcgaaaggaattcgccatccccaggcatgaagttgttcgtccgtcaaaatctgctgcaggatcaccaccacaagaatggccagcagttgaccgccaatcagcgtgacgtactggaatgaggcgtaaaaacctttacggccttccagggcaatttcgctcatgtaggtcgcactggtaccgtattcaccgcccaccgataatccctgaaataagcgggccagcaaaagtagcgccggtgcccaggtgccaatcgattcatatcccggtaagcaggcgatcaccagcgagccaaagcacatcatacacaccgagatcagcatcgaggccttacgccctcgacgatccgcaatacggccgaacagccagcccccgatgggtcgcattaaaaaccctgcggcaaaaaccccagccgtttgtagcagctgtgtagtggtgttgccggatgggaagaaaatatgtgcgaagtagagtgaacagaatgagtagacgtaaaagtcgaaccattcaaccagattccctgaagaggcgctgatgattgcccatacccttcttcgggtatcactgtgagccagcgtcccgtgtgatgtcatgctttctgtcattgtgattatgctcctgccataaactgcggcgtattgagccagaaggctcaataacctcgtaaatggaatgttataattttgttatagatgacattgcgacagggatcacacattccattagcaggataagggattaagagaaaggccaggatggagataaacatatcccctctttttcttccatttcggtggcgatgcttttcccgttttatttgcgatagcttcaatattctgccagagcctgctgtccggtatgttcagcacaatatcggggttacccgtgatattttcataacattttccggaggtgccaagcccgaacacgatattccggtcaaggatccaccatgatgaaaccgggctcaggttggttgaaccgtcaggattttggctggagataatggcgaccggtgtaccaaaatataaagaagcaaaatcgacctgctgggttttcattttatcatcctctgattaaaggagacccagtctacgttgtgcaaacgtgcgttacttcggtgaagcgcgaagtaaaacgcgccaggctaaaattcccaggggaactgcaatagctgccttgtacccaactgagcgagaacgtgcataatgcgtccaccttttgcgagaacgcgtaaggttcgttgtccctgccggaacagatttattgacttaaatcatgatgtctctttcattcgccgcctatcgtgtacacccctccttaaaacgaatcaaaaatgaaaaaaagaccgttcctgatggtgctttgtgctgtgtgctgcttttttgtagcgaacatcgccatggcaaaaaacagttcagtttccagtgaacaggttaaagagaacgttattgcagagtcgatagcatcttatcccggagtatgcgcttgtccttttaaccgggccagaaacggaagcgcttgcgggagacgcagcgcatggagtaagccgggaggctatgctcccatttgttataaaaatgaagtaacagatgagatggtaaagcagtggcgtgaaaataatagctaacccgcctccagcatcccaaaactcacaatccgcgcccgtcccagctcttttgcccggtataatgccacatccgcagcgcgcagcaggttgtcggtctgggcatgttgtgggtagctggcaatgccaatcgacacgtccaccggcccaatctcggtcagcccgtagcgaagcgacagctcatgcacgccggtgtaaatcttctgcgcgcaggcgtacgcttctgcttcatcggcaccggaaagcagcaccagaaactcctcgcccccgtagcggaatgccagtccgttgtcatgtgcggcgcgctgaacaattgacgccacgcttttgatcaccagatcgcccgcttcatggccgaagcgatcgttaatgctcttgaagtggtcgatatcaatcatcatgcagcttaacggcacgccggtgcgtatcgcctgtgccgtttgggtttgcagggtatcttccagatgatgacggttacgcaggccggtgagcgggtcaaacaacgctttttccagcaacgcgtcgcgcagacgctggttggccagcgccagcccgagcgcctcagccatcagctccagatatgcgcgggaaggggcattatccgccgtgatattctggaaggagagcaggccaatggcctcaccctgagcgataagcggcacgcaaagcgcgctttccgcctgggatgccggaagatgataacaggcaatatccggctcgccgttcaccggcggatgactctgcccgcgacgcacggcccagcactcgtccgggtggaacgtcgtctcttcacccaccggcgaaagccattgcgcgacgcagcgcatctgccacggttcgcggtcaaggacgtagagccggcccgcgatccccggcgcgatattgggggcaaacagctccgccacgttaatcacatcgttaaagttctcacacccctgcagccgctgggtcatgcgcgccagcagctcgcggatggcccagtcggcatcgcgctctttttccagacgctgtcgcgccaggccgttttcacggaagatgctgatggcctgagccatatcgcctatctcatcaatctggttgaaattgggcgtttcaaccgcgtaatcctgggatgccaggcggtgcaccacgtcgctcaggcggaccacggggcgcagcacgcggcgttttaatataaagccgagcacaaacaggaacagcagggcggtcaggccgaccgtcagctcagaggcggtacgcagcgctttcgattttttggtcgcctcctgaacggcggcgatgacgcgcttgtcgagtatctggcggaagtgatcgagctgattctgcgcgcgctcaagctcctgctcatagggctgaccatagagcaaggctacggcctgggcgtcttcaccgcgttccaggctttcgagggcggtttgctgctcgtcctgcagctcatcgacgatctttattccttcatgcagcagggccagttcttcatccgatgcgccgttatcctgcagcttttccagccgaagctcgatgcgcttcaggctgttttctgcctggttatattccttgagcacctgaggatcttttttaatggcgtacagccgcgctagatcagactgcgcccagatatcggtttcgatatcttccgtcagctgatcaaatttctgccgttgttcaacggcctgacgctcgagggtatccgcactggacgccatcagcatgatgatgccggaggcgatggtcaggcagaccgtggccccataggcccagtttgttatcgtcgcgattcgcaccagatgatccttttacgacatgagtaggatggcgttcttcaaattatagaaaacgtctgatttaaggcgaaaaaaaaggcggcacggcgccgcctggtgtggtctttatcgtcacgtccttacaaatctggaggattttttccttcttcgatgaaatccgcgtccagctcttcggcgttgccttcgtgatcgcgaccggagaagaggttccagcaggcgataaacagcgcggcgatgagcggcccaatcacaaagccgttaatgccgtacagctccatgccgccgagggtggagatcagaatcagatagtccggcattttggtgtctttccccaccagcagcgggcgcaggatgttgtccaccagcccgacgacgatcacgaagaagccgacaataaacagcccctgccagatctggtgcgtggcgaacaggaagatagcggcgggcacccagacaatcgccgagccgatggcgggcaccagcgagaggaaggccatcaatgtgccccagagcacgctgccgtcgataccggcaatggcaaaggcaatcccgccgaggatgccctgaaccacggccaccgccgccgtcccttttaccgtggcgcgcgacacgccgacgaatttggcgaacagatgctgcttggcaaaatcggacaggggcagggagtcgaggatctggcgtaccagatacgggccgtctttcagcaggaagaacagcagatacagcatgatgccgaagctaatcgcaaagccaaacgtgcctttgccgatcaggaacgcgctgcccgccagatactgtccgccctgcagcgcgacgtcggagagttttttctggatctgcgccgcgttggtcaggttgtgatccgcgaggaagccgctggcccagtcaggcaggtggttgaagatgctcgccaccacttccgggaactgggtgttgttctcctgcagtttggtgtaaaccacgttcagctcaatggcgagcgaggagaggatcaccatcagcggaataaagacgatcaggcagataataccgatggtcaacagcgaggccagcccgttgcgatcccccagcgcggcgcgaagcttgttttttaccggattgaagataacggtcagaatggcggcccacagtatcgcggagaagtagggcgacagcacgtcgaagaaggcccaggtcacaagggcgagaatgaaaataaagaaacctttagtcagtccgttaaagcgcatcagtcagtcctggttactaagaaactgtgacgactatagaactgattgtgagaattaccaaccttgcgccgggtggcggctgcgccttacccttcctacggggagtgttacggtatgacttcgcgctttacggataccactttcgactgaccgaagatcgccttttcccgcaccatgctgtaagtatctgcttgcggaggtgcttatggcctggcgtccgattctctatgtgatcctcacaacccaccccagactcagcgcgcggcgcgcccgtttgcgtctggtcatctagctttttattaacaatcgcggtataacacaccttctttggatgtttagatgtccatacgtatagaaggtaatatgcaaacacaacaagaaaatgggcagcttaagcgcaccatgaaaacacgccacctgatcatgctctcgctgggtggcgtgattgggacagggttattctttaataccggctacatcatttccacaaccggggcggcgggcacgctgctggcgtacctcataggtgcgctggtggtctggctggtgatgcagtgtctgggcgaactctccgtggcgatgccggaaaccggcgcgttccacgtctatgccgcgcgttatcttggcccggcgacgggctacaccgtggcgtggctctactggctcacctggacggtagcgttcggctcgagctttaccgccgcgggcttctgcatgcagtactggttcccgcaggtgcccgtctgggcgtggtgcgtggtcttctgcgtggtgatttttggcctgaacgtcatttccacgcgcttctttgcggagggtgagttctggttctcgctggtgaaagtcatcaccatcatcgccttcattattcttggcggcgcggcggtctttggctttatcccgatgcaggacggttcacccgcgccgggcttaagcaacatcaccgccgagggctggttcccgcacggcggcctgccgatcctgatgaccatggtggcggtgaactttgccttctccgggaccgaactgatcggtatcgcagcaggggaaacggagaacccgcacaaggtcatcccggtggcgatccgcaccaccattgcgcgcctgatcatcttctttatcggcaccgtgtttgtgctggcggcgctgatcccgatgcagcaggcgggcgtggaaaagagcccgttcgtgctggtgtttgaaaaggtcggtattccttacgcggcggatatttttaacttcgtgatcctgacggcgatcctttcggcggcgaactccgggctgtacgcctccgggcgcatgctgtggtcgctctctaatgagaaaacgctcccgcgctgctttgcccgcgtgaacaaaaacggcgtgccgctgacggcgctctcggtttctatgctcggcggcgtgctggcgctcttctcaagcgtcgtggcgcctgacacggtgtttgtcgcactctcggcgatttctggctttgcggtggtggccgtctggatcagcatctgtgcgtcgcacttcgttttccgtcgtcgccatctgcagtccggccagccgctctctgcgctgcagtaccgcgcgccgtggtatccgctggtgccggtactcggttttattctctgcgtggtggcctgcgtcggcctgtggtttgacccaagccagcgcattgccctttattgcgggatcccgtttgtcgccctgtgttatggtgcctactacctgacccgaaatatgacatcgcaggagcccgaacatgtcgcagaataatccgcttaccgccctccttgaaaagcagccgtttgtggtgctggatggcgcgatggcgacggagctggaagcgcgcggctgcaacctggcagacagcctctggtctgccaaagtgctgatggaaaacccggcgcttatccgtgaagtgcaccttgattactaccgcgcgggggcacaggtggcgatcaccgccagttaccaggccacgcctgcgggctttgcggcccgcggcctggacgaggcgcagtcccgggcgctaattggcagaagcgtggagctggcgcgtaaggcgcgtgaagcgtatctggccgaaaacccgcatgcgggcacgctgctggtggcgggatccgttgggccgtatggtgcctatctggcggatggctcagagtatcgcggtgactacgtgcgcagcgctgaggagtttacggccttccaccgcccgcgcgtggaagcgctgctggacgcgggcgctgacctgctggcctgcgaaacgctgccgtcttttgccgagattaaggcgctggcggcccttctggccgggtatccccgcgcccgggcgtggttctcctttaccctgcgggacagcgagcacctgagcgacggcacgccgctgcgtgacgtggtcagcgtgctggccgactctccgcatatcgtcgcgctgggcattaactgcatcgcgctggaaaataccacggcggcgctgaagcacctgcagagcctgacgtcgctgccgctggtggtctacccgaactcaggcgagcattatgatgcggtgaccaaaacctggcaccaccacggcgaagcgtgcgagacgctggcggggtatctgccccagtggctggacgccggagcgaagctgattggtggctgctgtcgcaccacgccgaaggatattgctgagcttaacgcgaagcgctgagttttttgccgggtggcggctgcgccttacccggcctacacattgtgcgatccgtaggccgggtaaggcgtagccgccacccggcatgaaccaaccgcacaaaaccaactatcctttcccattttttatctaaaaacgaatcgttatgagcgattcatttttattcctttatcaaaattcccgcgttggaaatactgccctcataacaacaaggggagcaggcactatggcaatttcatcgcgaatcacactactcggcgcactggcgctgtgggcatttcaggcgcaggcggtggacgtcaccgtcgcgtatcaaacttctgcggaaccggcgaaagtcgcgcaggcggataacacctttgccaaagagagcggcgcgaaggtcgactggcgcaagttcgacagcggcgcgtccgtggtgcgtgcgttagcctccggcgacgtgcagatcggcaatatcggttccagcccgctggcggttgcggccagccagcaggtgccgattgaggtgttcctgctcgcctcgcagctcggtaactctgaagcgctggtggtgaagaaaaacatcaccaaaccggaagacctgatcggcaaacgcatcgccgtgccgtttatctccaccacccactacagcctgctggcggcgctgaaacactggggcatcaagccgggtcaggttcaaatcatcaacctgcagccgccggcgattatcgcggcctggcagcgcggcgatattgacggggcctacgtgtgggcaccggccgtgaacgaactggaaaaagacggcaccgtgctgaccgactccgaaaaagtgggccagtggggggcgccgacgctcgacgtgtgggtggtgcgcaaagactttgccgagaagcatcctgaggtggtgaaagccttcgccaaaagcgcgattgacgcccagcagccgtacatcagtaacccggatgaatggctgaagcagcctgccaacctggaaaaactctcccgcctgagcggcgttccggaagcggacgtgccggggctggtgaagggcaatacctatctgacccccgcgcagcaggtgcagcagctgaccgggccggttaacaaagcgattgttgataccgccaccttcctgaaggagcagggcaaagtgcccgcagtagcggcggattacagccagtacgtgaccgatcgttttgtgaaataaggagttcgccatgctgaatattacaaatctgtctgccgattacggtggtaaatccgccttacaggacatcaacctgacgctggacagcggtgagctgctggtggtgctgggcccgtccgggtgcggaaaaaccaccctgctgaatctcatcgccgggtttgtcccttatcagcatggcaccattcaactggaaggcaaaaaggtggagggccccggcgccgagcgcggcgtggtcttccagaatgaaggcctgcttccctggcgcaacgtgcaggaaaacgtggcgtttgggctgcagcttgcgggcatccatcgtgaacagcggctggaaaccgcgcgggcgatgctgaaaaaagtggggctggaaggcgcggaaaaacgctatatctggcagctttccggcggccaacggcagcgcgtcgggattgcccgcgcgctggcagcgaatccgcagctgttgctgctggacgagccgttcggggcgctcgacgccttcactcgcgagcagatgcaaaccctgctcctgcgcctctggcatgagacgggcaagcaggtactgttgataacccacgatatcgaagaggcagtgtttatggctaccgagctggtgctgctctcgccggggccgggccgcgtgctggagcgcttgccgctggaattcgcccgccgctacgtcgcgggggaacccgtgcgcagcatcaaatccgacccgctgtttatcgaacagcgtgaatacgtcttaagccgcgtgtttgaacagcgggaggctttctcatgagcatcgtcttcagtgaaaaaacgcgccgcacgcgtctggcgctgcgctggcctttctcgcgccaaattaccttgagcgtcggtacgctgctggtgctgctggcggtgtggtgggcggttgctgcccagcagtgggtcagcccgctgtttctgccgccgccgggacaggtgctgagcaaacttattaccatcgccgggccgcagggctttatggatgccacgctctggcagcacttaggcgccagcctggcgcgcattctggtggcgctgctggcggcggtgattatcggcattcccgtggggattgcgatggggctgagcccgacggtgcgcggcatcctcgacccgctgattgagctttatcgtccggtcccgccgctggcctatcttccgctgatggtgatttggttcggcatcggtgaaacctcaaaaatcctgctgatctatctggcgattttcgccccggtcgccatgtcggcgctggcgggcgtgaagagcgcccagcaggtgcggatccgcgcggcgcagtcgctgggagccagccggacgcaggtgctgctgttcgtgattttaccgggcgcactgccggagattttaaccgggctgcgcatcggcctcggcgtgggctggtccacgctggtggcggcagagctgattgcggccacgcgcggcctcgggtttatggtgcagtcggcgggtgagttcctggcgactgacgtggtgctggcagggatcgcggtgatcgccgcgattgccttcggattagaactggggctgcgcgcgttacagcgccgcctgacgccctggcatggagaaatacaatgattgaacgtctgaccattaccccgctggggccgtacattggcgcacaggtgtcgggcctggatgtgacccgtccgctgagcgataaccagttcgagcagctgtaccacgcggtgctgcgtcatcaggtggtgttcctgcgcgaacaggcgatcaccccgcagcagcagcgcgcgctggccctgcggtttggcgatctgcatatccacccggtctatccgcatgcggaaggggtggaggagattatcgtcctcgacacccacaacgataatccgccggataacgataactggcacaccgatgtgacctttatcgagacgccgcccgccggggcgattctggcggcgaagctgctgccggagacggggggagataccctgtgggccagcggcattgcggcgtatgaggcgctctccgagccgttccggacgctgctgagggggctgcgggcggagcacgacttcaaaaaatcgttccaggagtacaagtaccgtaaaacggaagaggagcatcagcgctggcaggaggcggtggcgaaacatcctccgctgctgcacccggtggtgcggacccatccggtgacgggcaagcaggcgctgttcgtcaacgaagggttcaccacgcgcatcgtggacgtgacggaaaaagagagtgaggcgctgctcagtttcctgttcgcgcatatcaccaagccggagttccaggtgcgctggcgctggcaggagaacgatctggcgatctgggataaccgcgtgacgcagcattatgccaatgcggactatctgccgcagcgccggattatgcagcgggcgacaattttgggcgataagccgttttaccgcccctgatcctgtagtacccgtaggccgggtaagcgcagcgccacccggcgaaaacggtgcacaattgccgggtggcggctacgccttacccggcctaccaatcccaggccaattaaaggtgcgcctcaatataccgctgatagcggttcgccttcaggtaacacaaatccactagcaccagcccgtcaacgcagttgttgaacgccgggtcgctgccaaaatcaataaactgcacgccgccgggctcgcacagctcggaatattgcttgtagagcggcggaatgccgcagccaagattgccgagcagggatttcagcttcgtcagatcgtccacgtaatccacgccgccaaactgcgccagcacgtccggcagggacgcgggatagggcttgcgcgaggcggcgagcggatgcgtcgccgggaaccacaggcggtaaaaggcgaccagcagatcccgcgcggcaggcggtaagccgccggaaatcgagaccgggccaaacagatagcggtagtgcggataacgcgccagatacgccccaatgccggaccataaatagtccaggccgcggcgcccccagtagcgcggctgaataaagctgcgccccagctcaatgccgtgttccagcacgtcctgcattttgtcgtcgtagtggaacaggctatagctgtacaacccctcaacgccgcgcttttcgatctgcatggccgtcggcataaagcgatacgcgccgacgatctccagatcgtcctcatcccacaggatcaggtgcagataatcatcgtcgtagctgtcggtgtcccggcgtttgccgctcccttcctccactgcgcgaaaggcaatctcgcgcaggcggcccagctcgcgcagcagcggggcgtcttcctgaccgttgcgctgccaaagatagatggttttcccgtcgctggttttgcccagagattcggcctgcgccagcgcgcgcttcaaagtggcccggtcttccggacgggcaatcgcgcactgggttttaaagacgccgggcactcccttgccaagacgcatcacgtgctgacggcactgctcggccatctcacgcgacgaaagggtggcgctgtgccagtgatgccacgcaatctgctggccgattttaatcggcagctggctgtggcggcggcggaacatctgctgcatcagcagcagcatcgccagcgtcggagagaccagcgtgctggcgtaaaagagcaggctgttgtgcgcctgaatatgcaccggcagcagcgggacgcgcagcttgccggcgagtttgataaagccagagtgccatttcttatcgcgaatgcctttgcgcgtggggcgggaaacttcgcctgccgggaagaagatcagtacgcccgcgttttgcaggtgctgttccatctgcaccagcgacgacttcgccgtcctgccgcccatattgtccaccggaataaacagcgagctgaggggctcaaggtgggtcagcatccggttggtcacgactttaacgtcgtgccgcacgcgggagacggcgtacagcaacgccagaccgtccagcgtacccgtcgggtggttggcaatgatgaccagcgggccatgttcggggatttgttcgagatcgcgggcggaaacggtgcagagaatatccaggtgttccagaacctgctccaccatatccagtcctttcagatggcagtgggcggcggcaaactgctgaaactcgtcttcgtagaacagtctttttaacagacttttttgccagggtgcgggcctcgcctgaggccaaagatcgtcgagaacgctatcgaggctaaacatggtcactcctcctgccgtcttgcgaagacagtagaaggcgcagatgtcggttgtattgcagttgggtgaagatttgagcagagagcaggccgggtaaggcgaagccaccacccggcgctaaagcggattaacgcagaattttcttctcggccagatccagggcgaagtagctgaagatcagatccgcgccggcgcgtttgatcgcgcccaggctttcaaggatcactttctcttcgtcgatcgcccctgccagcgcggcgaacttgatcattgcgtactcgccactcacctggtaagcgcccagcggcagctcggtgcgttcgcggatgtcgcgcaggatatcaaggtatgcgccagccggttttaccatcaggcagtctgcgccctgggcttcatcgagcagggattcacgaatcgcttcgcggcggttcagcgggttcatctgataggttttacgatcgcccttcagcgccgtgccggctgcttcacggaacgggccgtagaaggaggaggcaaatttggtggagtaggacatgatggcggtgtcggtgaaaccggccgcgtccagcgcctgacgaatcgcctgaacctgtccgtccatcgccgcagacggtgcgatgaagtccgcacccgcagcggccgcgacgaccgcctgcttgccgaggttcagcagggtagcatcgttatccacgccgtgatcgcacagcacgccgcagtggccgtgagaggtatattcacagaaacaggtgtcggacatcaccaccatttccggcaccatctctttgcagatgcgggacatgcgggcgacgaggccatcttccttccacgcgtcgctgccggtggcgtcggtatgatgggagatgccgaaggtcatcaccgagcggatccccgcgttggcgatacgttcgatctcacgcgccagatatttctccggaatgcgcatgacgcccggcatggcctcgatggctttgtagtcatcgatctcttcttcaacaaaaatcggcaacaccagatcgtttaaggtcagggttgtctcttcaaacatagcgcgcagtgcaggtgacttacgcagacggcggggacgtgcaattaaatcggtcatggtatgcctgatgtttgtggaacaaagagggctagtgtacctcaaagtggcgacgggtgttttactaaagtgggcattttgcttttgcgaaatgcagcagaagagtttgcctgttaccaataatatataatgcaggacagtataacgctgagagaagaatgagatatttgtgttatttctatatggaaatgaatgtatcattaaaaatgatttattattttctatgatatttccctggttgctttgcccgtgcattaatattttgtttttataatatttattttatgacgccctgtgcgttgtggtctgaatctgttttttgtctgaatgcggacttaatggaaacattcattgaaccttttcgaaatgaaactgcataattccctccgcaattaaatattgcaaattcattgatggacaaacttgcttacgtccctgaggagggatgacccaatgcaaacatggaaaaagaaactcgttgtatctcaacttgcattagcctgcacccgggctatcgcttctcaggccaatgcgaaggatatttccggtacgacatataataccttcggatacgataatacagcgaccactccctggtattatggctatgccgactgggatttctcagatgccatccaagatggtgatatttacccggtgattaataaaaccaccgtgaatggtgttatttcaacgtactatctcgatgatggcatcaatggtcgggcgaatgcgttgagtatttccaacagcaccattaatggcatgattacctctcagtgtatgaccgccgcctgtgctgatggtctggatgccgacggcacccaacatgctcaatacgatcgttttagcctgaccgttgataattccaccattaacgatacgtatgaacattatgcgtatgatgttgtaaatggggaaaatacggaaagacactatctggatacctatgatatgggtaatgcgattaccctggatgtggaatcagatattgttatccagaataattctcacgtcgcggggattaccctgacgcaggggtatcaggaacgggataataccccgtacgacggcgttgaaggcgtagccaacagcagcaaggtctttaccgacacgctactggtaaaagattcggtactgacttccggtgcgtaccgcgatttaggtaccagcggattctacggtcagaccgcgaagccgagcgactatagtgaaaccgacgcgacaggggcagatgatgccgcgctgattgttaccgccagcgcgtctgataacgcgatgcagaccgctgccacgttcgatcactccaccgttacgggcgacatcctgttctccagcaccttcgacaacaacttctacccgaacggcgatccggcaaccgataccaccgaagacggcgtctataaccctaccaccaacggctgggacggcaccgataagctggatgtcaccctgaccaacggcagcaaatgggtcggtgctgcgcagtccagcgttgaggctatcggcacgacgcagatgtatggccagggctacagcaacgtagactggcgcacgctgtccccgaacagcatttggccggattccatctatgacagcaacgcacatgttgcgggtgaagcggtgtatcagagcggtctgtttaacattgcgctggataacggctccgagtgggatacccgcaagatgtctaacatcgacacgctgacggtaaacaaccagtctcaggtcaatgttgaaaactcaggcctgctggcggataccatcactctgaccaatgcttcctcattgaacattggcgacaacggcggcgtggccaccgaccatctgtatctggacagcgatagccgtgcggcactgacggaagaaacggccgagctgtatgccaacaccatcaccgtggataacggtgcagagctggcgctgggtctgggccaggttgatacgcacactatggttctgaccgatggcggcgtgctgaatgttgcgagccgcgattacgtgctgaacagcgatctgaacaacgcacgctatatcactaacgacaagcgcagcgccgattatgactacggcgtagtggccattcactctgacggccatctggcggtgaacggtgacgtcgcaggcaactataaagtccgtatcgacgacgcgaccggagcaggttccgtcgctgattacaaaaataaagagattgtccgtgtctatgacaataacgcggatacggcggccagctttactgccgcaaacaaagccgatttaggtgcttatacctaccaggcgcagcagcagggtgacaccgtcgttctgcagcagaaagaactgaccgactatgccaatatggcgctgagcatcccttctgctaataccaatatctggaatctgcagcaggatgccctaggtgcgcgtctgaccaacagccgtcacggcctggcggataacggcggggcgtgggtgagctacttcggcggcaacttcgacggtgacaacggcgttatcagctacgatcaggacgtgagcggtattatggtgggtctggatacccagattgacggtaataacgcgaagtggatcgtcggtggtgcggcaggtttcgcgaagggcgatatcagcgatcgtaccggtcaggtcgatcaggatagccagacggcgatgatctacgcgtcagcgaagttcatgaacgatcttttcctcgacagctccctgagctacacccgcttcaacaacgatctctccgctaacatgagcaacggtcagtatgttgacggcaataccaccagtgacgctgttggctttggtctgaagctgggttatgactggaaaccaaacctctctggctacgtaacaccatacgcagccgtatcgggtctgttccagtcaggcgatgattatcgcctcagcaatgacatgcgcatggatggacaatcatacgatagcctgcgttatgaactcggtgttgatacgggttacaccttcaactacggcggcgatcaggctctgaccccttacttcaaactggcctgggtttatgacgacgccgataacaatgccgatattaacggtgacagcattgataacggcgtgaaaggttcagctgttcgtgttgggctgggcacccagttcagcttcacgaagaacttcagcgcttacacggatgccacatatcttggcggcggcgacgttgaccagaactggggcgcaaacctgggtgtgaaatatacctggtaatgaataaagcgggggaggggttatctcctccgctttttagcgaagcaataaaaataatattgaaccgacaaatacggatgacttgaggtctgcatgaacgttaatgcgaaaccactttctgaattacgccggctcgaacaggggttaatagcagcaagtaccccttttacatgtgcaccccaacaattaattacgtcgggcgaatcgaatgagcctcgcacgatcgtattacaaaccggcgttattgagatctatcgcccttctgatgaacttctggtggggattgcgactgccccctttatttttggtctggctacggtgatgattaatcattcacaagaatacagagtgattgctaaaacggcctgtaccggtttttatttatccacagaaactacccgacaacaaatccagcaattttcactgtggaaagaggccttcagctggttatcctggataaattacattcttgagaagcgcgataagcagctggttggcaataactcctatcaccagatccgcgcgatgctgcttaatatggccgagtgggatgaaacgctgcgttcaaaaatcggtgtgatgaatcatattcagcaaagcacacgcatttcacgttctgttgttgccgaagttctggccgccctgcgacagggaaattatatcaatatgagccggggcaagctggtcagcatcaaccgcttgcccacggaatattaatctcagttggatgcggtaagcacctgggctttattggcactcaattccgccaccaggttattaacaccgtcactcatattgacgaaacgcgtatgcggggagcgagtgaccaccacaaacgcgcccacgttcgactgcggaatcatagccatataggtgatgaatccgccgccgccgccggttttctgaataatccccggccggccatttttcggtgccatatagacccagcccatgccgagcgcatcggctttacccggcacgtccatcccgatgacccgatgcagctgagtacgctgataaatcagggtctgcatacggtcggcctggctgctgcgagagtagaaatccgaagaaaggaactgctgcatccagcgcatcatgtcgccaggcgtggagtaaaccccgccgctgcccacggccgccagcgtgttattacaggggctggcgcctttctccgctaccatcaggcgacggcactggtccggggacggggtaaaggtggtgtctttcatgccgagcggacgggtgatctgctcttcaaacagctgcgtgtagggtttgccagccgccgttgagagggcatccgccagcaggtcaaacgccaggtttgaatatgaggcctgagagcccggcgccgccttcaacgtggcggtactcaggtagctccagcgctggtcgcgcgttggccagacgaatacgtcacgatgcgccgcgccgcctggctgttcacgcggcagggcgctggtgtgggtagcaaggttcacaagccggatcggcgtcccctgatacgtggggacccgggcgcctggcggcgcgtatttgctgagcggatcgtcgagcttcaccacgccctggtcgagcagtttcaccagcatttcgctggtcatcagcttggttaaggatgcgatgcggataacggaatccagctgcgggtgaacgttattgcccgggcgcgtttcgccaaagctgcgaaatacacgctggtttccgtcgataacgaccatcgccataccggtcgcgccgctgccgtaatagataaggttcgcgtagcgatcggcaatatctgaagctaaaacgggagccgtcagcggttgggctgcctgggcggtagaaaagctcaccgcacacagcgcggcaaaagagagcagacaacgtttcaacgaaaagcatccatgaagtgaatgaggaaagtaatgggtatttatactactaatcggtaccgtgcaatgccccgaattgcataacgatagcgagaaaaacgtaaccatgggtaaatatgaacaatttacttgcgagccatctcccattttgtgacatcgggcttatgataggcaccagtgtcactcaatcttacggagaacggtatgtctgagaagcgtgtggttatggttgtcgatatgcaaaacggggtgtttgaaacccctcgtcatcagcgcgaaaagtgtgtctctctgatcaaccagcttacacaggcagccgatacggtgatttttatacagcataccgaggccggggggctggaagagggaagcgaagggtttgcgctactgcctgaactccatcagcctgccgacgcgctttacgtgaccaaaacggcctgcgatgccttctacaacaccgggcttgaggcgctgctgcgggagcagggcattcgcgagtttgtcatctgcggctgcgccaccgattactgcgtcgatgcgacgatcaagaacggcgtcagccggggttatcacatcaccgttgccgaagatgcccataccaccgccaaccgtccggctgctgacgcacagatcctgattaaccatcacaacgacgtctggcgtaacttcattgcgccagcgaatcctctcgcggtgaaacgcaccgaaacaattcttgaaaactggaaagcgaactaataattaacgctcgggtctgacctttttgccggagccgggaggctggctcgggcaggttttcgtgtggtgacgtgttgtacacagcaacagccataacaacaagaaggaagcattatgtttaagtcttttttcccaaagccggggccttttttcctgtcggcatttatttgggcactgatcgctgtcattttctggcaggcgggcggcggcgcatggctgacgcgcatcacgggggcgacaggtgaggtgccgattagcgcggcgcgcttctggtcgctcagctttatcgtattttatgcctactacacggtatgtgtggggctgtttgcactcttctggttcaagtattctccgcatcgttggcaggtttggtcgattttgggatctgcgctgatcattttcgttacctggttcatggtggaagtgagcgttgcaattaatgcatggtatgcacccttctacgatttgatccaaaaagcgctaagcgccccgaataaggttccgattggtgaactctatgccagtctcgttagttttaccggcattgccatgattgcagtaacagtggcagtgctgaacaatttcttcgttagccattacgttttccgttggcgtactgctatgaacgaatattacatggcaaattggcaacgactgcggcacatcgaaggtgctgcacagcgtgtgcaggaagacaccatgcgttttgcctcaacgctggaggacatgggggtcagcttgcttaatgctgtgatgaaacttatcgctttcttaccgattctgattgcactttcgccccatgtgcctgaacttccaattgttggtcatttaccctatggtttggttattgccgcactggtctggtctcttatgggaacggggcttcttgctgtggtggggatcaaattgccggggttacaatttaaaaatcagcgcgtggaagcggcttaccgtaaagaactcgtttacggtgaggatgacccatcacgagctgcgccaccaacgataaaagagttatttcagaacgtccgttttaactactttaagctctacttccactacatgtatttcaacatagctcgtattttatatcttcaggccgatactgtttttggaatagtcctgttgttcccgtcaattgttgcagggacaattaccctgggactgatgacccaaattactaacgttttcgatcaggtcagaagttcattccagtacctgatcagctcctggaccacgctggtggaactgatgtccatctacaaacgtctgcgcagctttgaacgcgagctggacgatcgtgacctgcaggaagtcaccaacacattgagctaatacaggacgttgctatgccttttgccgtaccgcgcgcgttaccgttgaccatactggccgcttttgtgctggcaggctgtgccgaaaagggggccgctccgctcaaaaagggcgagaagcccgttgatgtggcgagcgttgtgcggcagaaaatgcccgccagcgtgaaagatcgcaatgcgtgggcagacgcgctggcaaaaacctttgagagccaaaagattgcgccgaccgaggaaaacatctgttcggtgctggcggtggcacagcaggagtcgatgtatcagtcagacccggctgtgccggggctgaataaaatcgcctggaaagagatcgaccgccgcgcggagtccatgcatatcccggtgttcctcgtgcataccgcgcttaaaatcacctcgccgaacggtaaaagctacagcgaacggctggatacggtgaaaaccgaaaaacagcttagcgctattttcgatgatttcatcaacatggtgccgatggggcagaagctgtttggctcactgaacccggtccacaccggtggcccaatgcaggtaagcatcgcgttcgcggagaaacacaccgacggctatccgtggaaaatcgacggtacggtgcgccaggaggtcttctccctgcgcggcggactgtggttcggcacgtatcacctgctgaactacccggcgaactacgatgagccgctgtaccgctttgccgactttaacgcaggctggtatgccagccgtaatgcggcattccagagtgcggtcagccgcgcaagcggcgttaagctggcgctggacggcgatctcatcgcttacggcagcagcgaggcgggaagcaccgagcttgccgtacggaaattatcgacaacgcttggcttgagcaacagcgacattcgccgtcagcttgagaaaggcgacagcctggcctttgagaaaacggatctctacaagaaagtgtttgcgcttgccgataagaaaagcgggaaaaccttaccgagggctatcctgccggggatccagctggaaagcccgaagatcacgcgtaacctgaccaccgcgtggttcgcgaaacgcgtggaggatcgccgggctcgctgtatggggctttaatggcgacggcgaaagcgcaggacgagcgcgacaacgcctaaaatcatgcaccccgcgaggaaggggatcaggccgaacagggtgctgacgccaaagccaatctcaactcgcgggcgtccgttatcctgtacctgcatgagatgttcataaacgccaggcgcatggaccagcatattgagcagctgcgagccagcccagaagcagaacagaacaaacagggcatacgcgatattacccgccgtggaggtttttggttttccgccaaaaatcggtttcgacaatgtaaagtcagccatgatgacctccggataaatcgctctgttaatacgcttcgtacagggtgagtttgacaggtcatcgcatttgtcaatatcagaatcgtggtaatttacgcgccggaatcctcctggattgttgatttctgcagcacgtcacaatttattaacttaagtgaaattgcgtcgcgtttcagaatttccgtatctgccacagacatggccgtaaaactgtgagaggatgtctttttttcctgccggagttgttatgaagctcacgtccaaactacgccgtgactggcactactacgccttcgctatcgggctgatctttattcttaacggtgtcgtgggcctgctggggtttgaggcaaaaggctggcaaacctatgccgttgggctggtgacctgggtcatcagtttctggctggcggggttgattatccgccgccgtcctgaagagacgacagcggatgaggcagcgtcggcgaagcgcgccgattaaccgtttacggaacttttaagcgcgctgtcggcagcgtgacgctccagcgccagttcgatcaggcgggtgatcagttccgggtagctcaggccgctcgcttgccacagcttcggatacatgctgatgttagtgaaccccggcagcgtgttgatttcattgatcaccacctcgttttccgccgtcaggaacacatccacgcgcgccatgccgcagcagccgagcgtctgataagcgcgaatggcgatcgcccggatcttatcgttaaccgccggatcgagatccgcaggcacgacaacctgcgcgcctttatcatcaatgtatttggtgtcgtacgagtagaagtcgctgtttaagaccacttcgccgcaggtgctcgcctgtggaaaatcgttgcccagcacggcgcactcaatttcacggcctttgatgccctgctcaaccaccactttatggtcgaactcaaacgccaggcggacggcctgggtgaactctgcttcgcttgtcactttgctgacgcccacggaggagccctggttcgccggcttcacaaacagcggcagacccaattcagcgctaatctgcgcgaagctgtgcttgtcgcggttggcgcgggcgagcgtgacgaacggcgcgatattcagcccggcgtcgcgcagcaggcgtttggtgacgtctttgtccatgcacgcggcggagccgagtacgtccgagccgacgaacggcaggttggccatgcgcagcatcccctgcagagaaccatcttcccccagcgtgccgtgcacgatagggaagaccacgtcgatctgggcgagtgcctgagcattgccggcatcgataagctgccccttcgcgacgccgggtacggtggcgacgctaatttctgaaggattcagggcgatatgggccggatcgtgagcattcagcagatactggctggcatcgttaacgtgccactggccctgtttatcaatgcccagcagcaccacgtcgaaacggcttttatcgatcgcatcaacgatatttttagccgattgcaatgacacttcgtgttccgctgattttcccccaaagacaatacctacgcgctgcttagccatctcactctcttccagtctgacgaaaagccaataacataccacgatgcccggcgggtttcgcgaccttctgccataatgtttgggggaatgttcaggggggcgagtgaaaggaaaaacgctgctgaccgttttgattcttatcgccgtcgcaacggtgggttaccgctggttgccgccttactacaaccctttcataccgctgacgcttgacgatccgccaggccgaatcacccagtataagcttcggcgcttaacgcccgaggcctgcgcaagcctgcttgcgcaggctaatcaacgcgatctcatccgcacccagccggtcgctgacagcgccggggaatgcccgctgagcaacgtcgtgcgcgtgcgcaacttcggcccggtcggcctgaacggcagttttcttgccagctgtccgctggcgctcagctcagccctctttatcagccagcaggcccggccgctgacaaaacgctatacgggcagcgacctcgcgcgtatcgaccacctcggcagctttgcctgccgcaatatttaccaccgccctgacgcgcgccgcagcgagcatgccacggcggaggcgctggatattgccgcttttcgtctggcgaacggcgaccgcgtcacggtgctgaacggctggaaggcggccacgacgcagccttggctgaaggcgatgctggcggcaagctgcgggtactacgggaacggtctggggccagagtacaacgcggcgcatgccaaccattttcatctcggaatgcgaggttttggcctgtgccggtgaagcataatattccgccagaaaatggatgaattgtgacttatttcacaaatatgatgactgggaagataaaacaccaaagtcggtcaggccgcatctctggtgcgacgttaacacgcgtaacttgctaatctgacggcgaattcgcctaaaaatgaagactattctgtatggaatcctggaaagttaatctcttctcggtctggttcggttgcttcttcaccgggctggccatcagccagattttgccgttcctgccgctgtacgtctcgcagctgggggtcacctcgcacgaagcgctctccatgtggtccggcctgacgttcagcgtcacctttctggtttccgcgattgtgtcacccatgtggggcagcctggccgatcgaaaaggcagaaaactgatgctgctgcgcgcctcgctcgggatggcaatagccattctgctgcaggccttcgccaccaacgtctggcagctgttctttctgcgggcggtgatggggctgacgtccgggtatattccaaacgccatggcgctggtcgcctctcaggtgccgcgcgagcggagcggctgggcgctgagcacgctctccacggcgcagatcagcggcgtcatcggtggcccgctgctggggggctttctggcggaccacgtcggactgcgcgcggtatttatcatcactgcggttctgctggtggtcagttttctggtcacgctctttctgattaaagagggaggccgcccggttatcagtaaatctgaacgcctgagcggcaaggccgttttcgcctcgctgccttatccggggctgatgatcagcctgtttgtcaccaccatggtgatccagctctgtaacggttcggtggggccgatactggcgctgtttatcaagtcaatggagccggagagcacgaacatcgcttttttaagcggcatgattgccgccgtgccgggcgtatccgccctgatttccgcgccgcgtctcggaaaactgggtgacaggatcggtacggcgcgcatcctgatggcgacgctgatctttgcggtggtgctctttttcgccatgtcgtttgtcacctctccgcttcagcttggcgtactgcgatttctgctcggctttgccgatggcgccatgttgcctgcggtacagaccctgctggtcaaatattccagcgaccaggtgacggggcgtatttttggatataaccagtcatttatgtatctggggaatgttgccggtccgcttattggcgcctccgtttccgcgatggccggttttcgttgggtatttgcggcgacggcgattgtcgttttaatcaatattatccagctggctattgcgctgcgacgccgcagacaaatggcggaggcgaaatcggcgagataacgctttcgcagatgtattatatattcttatggtagccgcatttttatataacaaaatgcggcgtctttttatagaaaaacgtttcgctcacggcgaggtctctttatttccgtttctgtatcacttttgcataccataattaatttcttctctttgcattatggattcagagtgataaggtcagataaaactgaaaaggaactggcacgatgaaaaacctcattgctgaattgctggtcaagctggcacaaaaggaagaagagtcaaaagagctggtggcccaggtcgaagcgcttgaaattgtggtcaccgcgctgctgcgacaaatggcgaaaaccgatcagcaggcgttgattgagagcgtggaaggcgcgctggagagcgtcaggcctgaatcgcaggtaccgattgaagatgctgagatgctccaccagtacgtaaagaagctgttaaggcatccgcgcagctaaaccgtcacaggacgtaacgacgtgtcatagaattgtcatgcaggatgcctatagtcgctctgtttttatttttatgtatttttacatggagaaaataaattgaaacagagcgcacttttcatcgcattacttcctctgttaattacccctgccatttatgctgacacgacgcaaaccagcgtcctggataatcgtgcggcaaaaggggatatcacccagcccggcggcgcgcgccgattgtcggaagatcaaaccgccgccattcgcgcttcgcttaatgaaaaaccggcgaaaaatattattctgctgattggcgatggaatgggtgattccgaaatcacggcggcgcgaaattatgccgagggggcgggcggcttttttaaaggtatcgacgcattaccgctgaccggacaatatacccactacgcgctggataaaaaaaccggtaaaccggattacgtaacggactctgcggcctcggccacggcgtggtccaccggcgtgaaaacctataatggcgcgctgggcgtggatattcacgaaaaagatcgtcaaacccttctggagatggcaaaagcggcgggcctggcgaccggtaacgtctccaccgctgaacttcaggatgcgacgcctgcggcgctggtggcacacgtgacctcgcgtaaatgctacggcccgtcagtgaccagcgaaaaatgcccaacgaacgcgctggaaaaaggcggcaaaggctcgattacggaacagctgctgaatgcgcgtcctgacgtgacgctgggcggcggcgcgaaaaccttcgcggaaaccgcgacggcgggcgagtggcagggcaaaacgctgcgcgagcaggcgcaggcgcgcggctatcagctggtgagtgacgcaaattcgctggcggcgataaccgaggcgaaccaggacaaaccgctgctggggctgttctctgacggcaacatgcccgtgcgctgggaaggtccaaaagcctcatatcacggcaatatcgataagccagcagtgacctgtacgcctaaccctaaacgcacggacagcctaccgacgctggcggcgatgaccgataaagcgatcgatctgctgagcaagagcgaaaaagggttcttcctgcaggttgagggggcgtcgatcgataagcaggatcatgcggcaaatccgtgcggtcagattggcgaaaccgtcgatctggacgaagcggtgcagaaggcgctcgcgttcgcgaaaaaagacggtaacaccctggtgatcgtcactgcggatcacgcgcacgccagccagatcgttccgccagataccaaagcccctggcctgacgcaggcgctcaacaccaaagatggcgccgtcatggtaatgagctacggcaactctgaagaagagtccatggagcacaccggcacccagctgcgcattgccgcctacggcccgcacgcggccaatgtggtaggcctgaccgatcaaacggatctgttctacaccatgaaggcggcgctgggtctgaaatgataaattcccggcggaaatcacatctgccgggtggtttttttcctgtcacgaaccagacttacagggaatgttcacaaaaggatggtgcaatgaaaacaacattactggttactctgctctccggcctgttcctggtcgcatcggcgaacgcggaagagaaaacgttaacgccgcagcagcagcgtatgaccacctgtaatcaacaggcgacgtctcagagtctgaagggcgatgcccgcaagacctacatgagcgactgcctcaaaaacggcgcttcaaagccagctgaaaaaagcctgacgcctcagcagcaaaagatgcgcgagtgtaatgccaaggcaaccgagcagtccctgaaaggggatgaccgcagcaagttcatgagtgcctgcctgaagaaaaaagtgtagttcgaacgggtgagcggctccggcggctcacccgaaatttcatactttccccgcagaccccctctctataatttgggaaaatgtttcagaatattcccaaaaatgatgaatgatgaaacgtattacaacacaaagcgcattcgggaagagtggaatttaaccctttctcaggatgaccctcaccgcgccggcattcagtttgcccggcgcgttcggctggcgcgcgccgtggggctggcagcgatgtttttcccggttgcgggcatgctggtcacccattttttacccggaggctggtggcttttactggtggggtgggcgttcgtctggccccatttcgcctggcagttatcctgtcgggccgcgtcacctcatcagcaggaagagttcaatcttaagatcgatgccattattgccgggctctggatcggcgtgatggggatgagcgcgttacccacggcagcgctggtgatgatggtcgggatgaatatgatgggctccgggggctgtcgtctgtttatcccggggatcctgctgactctgctctccgcgctggtgacgctgccgcttgttgggcgcgtggccgtcttcaaccccgacctcgtggagtggagcttaacgcttcccgtactggtgctttatcccatgctgtttgcctggctcagccaccgcaccgccgtcaggcttgcggaacataaacagcggctggaaatgatgagcacccgcgacggcatgaccggggtctataatcgccgacactgggaaatgctgctgcgaaatgaatttgagcattgccgccgcgatcgctgcaccgccacgattttactgattgatatcgaccactttaaaaatatcaacgatacctgggggcacgccgtgggggatgaggcgatcattgccatcacgcgccagcttcagatgtcggtgcggtcaggtgatgccatcggccggtttggcggggatgagtttgcggtgattatgtcgcagaccgcagcggaaagcgccatcgccgtcatgtcccgggtgcatgagcggctggaaaagctgtcgctaccgtgcgcgccaaaagaggcgctgcgcatcagcgtgggcgttgccccctgggggccgcagtttgcacattatcgggaatggctaaaggcggctgacgtggcgctgtacagggcgaaaaatgccgggcgcagccgcaccgaagtggccgcctgacgcccgactgaagcgatcaggatttactcagcttctctgatttttccatgcattttgccattgcctcaatgacggccgagcggaatccgcgctcctccagcacccgcaccgcttcgatggtggtaccgcccggggagcaaaccatatctttcagttcacccgggtgtttgccggtttccagcaccattttggcggagcccatgacggcctgcgcggcgaacttatacgcctgggcgcgcggcattccgccaagcacggcggcatcggccatcgcttccaggaacatgaagacatacgcaggcgcagaaccactcacgcccaccaccggatggatcatcgattcggcaatcacttccgcttcgccgaagcagcggaaaatgttcagcacatcggctacgtcttccggggtcaccagcgcgttaggcgtgacggaggtcatgccggcgttaaccagcgagggggtattgggcattgcgcgaacaattttgcggtcatggcccagcgcgcgcgccagctggtcaagcgtcacgcccgcggcaatcgacaccaccagcgtctctttattcaggctggaggtgatgtcgctcagcactttgatcatgatgttcggcttgacggcgccaaagacgatatcggcgacctgggccacttcctgcgcgctttcggcggcgttaatcccgtattgatcgcgcagcgcggcgaccttgtccggtgacggggtatagacccaaatctgacccggcagcacctgcccgctggcgatcaggccgcccagaatggctttgcccatgttaccgcagccgataaacccgattttcttgtccatcacgatcctccgtcattatgcgttgttttctctgattgatagcttaacaacgaaatgcaggcgacaatagtcggcagagtcattatggggagacaatatggcgatttgggttgatgcggacgcgtgtccgaacgtgattaaagagattttatttcgcgccgccgagcgcgttcagatgccgctgacgctggtggcgaaccagaacattcgcgtgccgccttcgcgcttcattcgttctttgcgcgtgcctaccgggtttgacgtggcggacaacgaaattgtccgcctgtgcagcgcggaagatctggtgatcacggcggatattccgctggcggccgacgtgctggagaaaggggcggcagcgctcaatccgcgcggtgagcgatactcgccgtcgaccatccgcgagaagcttacgatgcgcgattttatggataccatgcgggccagcggcgtgcagaccggtgggccggacagcctgtcacagcgcgatcgccagcagtttgctgccgagctggataaatggctgctggaagtgaagcgccgtacagcgaaatgataattattgtcaatgtgtggtacagtgtggcctccacagggttgtcatcccgtaccgctttgcagtaaagtaatcgcaacatcttctgcaattatttctttacactcttcagccttccggcatcaaggggaacacctggctatgacccaacccatctttttagttggcccccgcggctgtgggaaaaccaccgttggcctggagctggcacgcgtgtgtcatcgccagtttgtggataccgaccactggctgcaaaccgaggccggaaaaaccatcgccgacattgttgagcaggaaggctgggagagctttcgcgcacgcgaaacggccgcgctgaaagcggtcacgaccccgtccgcggtgatcgccaccggcggtggcattgttctggcggagtgtaatcgtcactttatgcgcgaaaaggggattgtgatttacctcagcgcgccggtgtcggccctggttgggcgtctggaagcctttccggaagaggggcaacgccctgcgctgacctccaggccgctgaacgaagaggtgagtgaagtgctggccgaacgcgatgcgttataccgcgaagcggctcaccacgtggtggatgcgtccgcctctcccgaagacgttgtgattcagattattaccgccctgcgtttggcgtgtgccagctaagcggcgtctatacttatagctcagacataaaaaaaggatgagctatgccaacaagacctccctatccgcgtgaagcgcgcattgtgaccgttgaaaaaggccagacaggtcacactgtgacctggtatcaactgcgtgccgatcaccccaaacccgactcgctgatcagtgaacacgagacggaacaggaagcgctggatgcgaagcggcgctatgaagatcccgacataacctgagcggtttcctaaacgctccaggatcgtgcctgaatcacactttttactcatcgtaaaagttaagcaggagttaatatttagttaatacaagtaactctggtatcggcaggcgatctttacatttcggtgtcgggatcacctgctacgcttggtgctgttttgttgaaaaaacgaactgtgcagcgtagtgagcctgtacctgtgtgcacgatgttggagtaatggaaggcgataaagatgaaggcaacgttggcgatcctcaccattggtgtggtccctgtaagcgaagtgttaccgctcttaaccgagcatgtatctgaacaacagattacgcatctcagcctgctgggcaagatgagtcgggaagaggtcatggaagactacgctgtcgaggcgggggaggatcccctggcgacgttattaagtgacggtaaactggcgcatgtttcccgccagaagatcgagcgctcgctacagggcgtaatagaagtgctcgataatcagggctatgacgttattttgctgatgagcaccgcccccataaagggacttacggcgcgcaatgcgattttgctggaaccgatgcgcatcattccgccgctggtggcctccatcgtggatggtcatcaggtgggggtgattgtccccatcgaggagctcatggataaccaggaggcaaaatggcacgtgctggaaaaagtgcccttgtacgcgctggcgaatccgttctgggacagcgaggccaaactcattgcggccgggaaggaactgctggaaagaggggccgatgtcctgattctggactgcctggggttccaccagcatcatcgtgatttattgcaaaaagcgctggatgtgccggtgctgttatccaacgttctgatggctcgcctggcctcggaactgctcatgtaatgattttgcgtgacaggtgatgagcatggcccctatagtgaatttttatctaaaaatataagggccagttcatgcttcagagtaacgaatacttttccggtaaagtgaaatccattggttttaccagcagcagcactggccgcgccagcgttggcgtcatggcggaaggggaatacaccttcggcacggcggaagcggaagagatgacggtcgtcagcggggcgctgaacgtcttactgccgggtgaaacggaatggaaagtttacgcagccggacaggttttcaacgtccctggccacagtgagttccatctgcaggtggctgaacctacctcttatctgtgccgctacctgaaataaaaaattagccgggtggcgctaacgcttacccggcctacggtttgcccgttatctctgcgcttcgccgccgagaccttccaccagattctgaatcaacgccgccagctcgccggtcatcaggatgaagtccgcgtcgaaacgctgggcgtaatcttccctgtcgatatcttcgttctgatcgcgcagctcgtcgcagaacttcagacgcttcacggagccgtcgtcgcacatcacgaactgaatacgctgctgccagtcgagcgccagcttggtgaccactttgcccgcttcgatgtggacggcgatctcgtcgctcaccagatcctgcttcttcgcgcggatcacgccgccatcttccagcagggctttcagctcggcttcatcaaggatctggaaaccctgagccgcagcaccgctgcgtacccattcggtcagcgtcagctcgatcggcgtttccagcgccagcggaacgaccggtaacgagccgatgcttttacgcagcagggccagcgtatcttctgctttcttggcgctggcgcagtccaccatgatcagcccgttaacggtgtcgatccacatcatggtctggctgaagcggctgaaggcgcgcggcagcagggagtgcagtacttcatctttcagcgaatctttttcggtctttttcagcttgcggccctgttcggcttccagcttgagaattttcgcttcgagtgcctgcttaaccaccggcgtcggcagtattttctcttctttacgggcgcagacgatgatttgacccgtgctgctggcgtgggtcagtgcatcgctttgtgaacccattggcggaacccaaccggttttcgccatatcctggctaccgcaaggggaaaaggtataagcggctaactgtttttccatctcttctgcacgcagcgaaacgtcgcggctgagacggtaaaccatcaaatttttgaaccacagcatgataatttccacggccttgtcgttaaatcagcgggcatgataacgaattgtcgcatcgcttgcattgctaatcgggaagcgtgcttctactctgttgataatcaaaataatgaggagagtcttgtgcgtattgggatcgatttgggcggcaccaaaacagaagtcatcgcactgagcgagcagggggagcagctgttccgccatcgtctgccaacgccgcgcgatgattatcaccagactatcgagacgattgccaggctggtcgagatggccgagcaggcgacagggcaaaccggcagcgtcgggatggggataccggggtcgatctcgccgtataccggcgtggttaaaaatgccaactccacctggctcaacggtcagccgtttgataaagatttaagcgcgcgcctgaagcgggaagtgcgtctggccaacgacgccaactgcctggcggtctctgaggccatcgacggcgcggcggccggtgcccagaccgtgtttgccgtgatcgtcggcaccggctgcggtgcgggcgtagcgttcggcgggcgcgcccataccggcggtaacggcaccgcgggcgagtgggggcacaacccgctgccgtggatggatgaagacgaactcaaataccgcaccgaagtgccgtgctactgcggaaaacagggctgtattgagacctttatctccggtaccggttttgcgaccgattaccaccgcctgagcggccagccgctcaagggcaacgagatcatgcgtctggtcgaagcgcaggatccggtggcggagctggccctgagccgctatgaaatgcggctggcgaaatccctggcgcacgtggtgaatattctcgatccggacgtaattgtgctgggcggcggcatgagcaacgtcgaccggctgtacgccacggtgccgaacctggtgaagcagtgggtcttcggcggcgagtgtgaaacgccgatccgtaaagccgtccacggtgattccagcggcgtgcgcggcgcggcgtggctgtggcccgaataaacggctctgtaagcccggtaagcgaagcgccaccgggcgaattcaggcagccacaataaaaaagccggggggcggctacgccttacccggcctacatgtggagtgaacctttactgcacggcaaattctttatccagcttgctataccccagcccgttaatcttcttcactttgatctgcaccggaatacgctctttcatcgcctctacgtggctgatcacgccgatggttttcccggtggcgttcagcgcgtcgagcgcatccagcgccgtatccagcgtctcactgtcgagcgtgccgaacccttcatccaggaacagggaatcgatccgcgttttatgactcaccaggtcggaaagcgccagcgccagcgccaggctgaccaggaagctctcgccgccggagagggtgcgggtatcgcggaccgcatccgcctgccacgtatccaccacttccagctccagcgcgtcgctggccttacgctgcaataagtaacgtccgtgcagacggttaagctgctggttagccagccagacaagattgtccagcgtcagcccctgggcgaacttacggaacttgtcgccggtgctggagccgatcagcgcgttcagataaccccagtcatccgcctggcgcgcggcctcttcaatttgctgcatcaacgccagctggtgctgccggttatcgctgtcctgcttaagctgctggcggatctcgccctgatgcgtggtgttatcccgaagctgttgcgccagctgctgcagctggctttgcagcgtggcggcatcggcgtcgagcccttccgggcgcagcgccagatgagactgtagctgctggttagcttgcccgcacagcgccgcggcctgctggatctggttttccagcgactgtttcagctgttcaaggtggcgaatagcatcgtcatccagcagggcgacaagaaacgcgtcctggtcggcaaagcagctcgccgagcgcgccgcggtgaactgcgtctgcgactgctgcaggcgctctcgctccagcgcttcctgctgctgttgcgcggtcagctggctttgcagcgacacgcactcgtcgtggatggcgcgccagttatcaggaataaccggttcggcgtcttcgctgttcgctgccggaagcgcgtcgagcagcggcttcagggcgtttatgcgttcctgaagcacgccgtgctgcgtttgcttctcctgccactgcgcgaattccgcttcgcgggcctgaagccaggcggcttcctgaccctcttcaggtgcgttaagcgagagcgcgagcagggcatgttccagcgcctgccgcgtggccgccagctgctgctgatactgccgctcctgcgcttcctgttcgttgagctggttctgcagggtgagacgctgactgaactgataaagctggtgctcgtaatgttcctgttcgttcagccatggcgcgatatcgtcctgaatattcaaggtaatgttcagggacgtgcaggctgccacccactctttagtgagcgcttgctcttcctgagaaagcgtctgcgcgtcgtctgcctcgcgctggatctgctgagtcagggcattgacctgtcccagcaccagcaggccttcctctttaagggcggcgacctctttttccagggcatcacggcggcgctggttatccgtcagctcaagcgactgatattgctcaacggcgggatgttcacaggaaccgcacagcggacagggtttgcccgcctcaagccgggagcggtaatgctccagcttcttaattgttgcttcggtttcgcacagggcttttagatcgagatagtgctggtttttctctttgtactgctggcggcgcagcgtcagcgtttcattgagtttattttgttcggcctgggccttctgcacgctttcactgctctggcgcaggcgcttttgcagcggctgatagcgggcatgcagcgacgtcagctgctggcgcagcgtgcgggacctggactgctgctccatggccgcgctgacctcacccgccgtcagcgtcagcgcgttttccggcatcgcagccagcctgttgcgtaattcacctatccgcgcagcaagcgaggctaactgcgttttatcacggttaagctgcgagaactgggcgcgccagcctgcaatctcctggcctaacagacgatagcgctcgtgctccgccagccactgcgccagcgccgtcagttcggtctgaagcagctcgtggttacgcagggcggtattgcgaatacgcgaacgcagcgcggttctggcttgtaagcgagtatttacttcgataattcgctgctgcgtttgcgccagacgcgcggtttgctcctgctgatgttcccagagcgggcgaagctgggcggcgggcagagcgagctggagctttgccagctcaggcgcagcgtccgtcagcgcctgttgcgcctgctgctgcattgcggcgacgcgctgttgctcgcgcgcaagctcatcatggcgcgtaagccactgaaaatgtttctgttggttttgctgctgttccagcagggttttctctgcgtcagtaagtgcctgcaaactttgctgtaactgctgctgttgttcttcgctcaacagcacgacgcccgccgcctgcgcctcgcacttttcaagcacgctgcgggccgctttgtgtttctcaaacaccatggcggaaatctgaccgtagatttcggtgccggtcagctcttccagcagctcggcgcgatcgctcggcttggcattaaggaaggcggcaaactgcccctgagagagcagcatcgagcgggtaaagcgcccgtagtccagcccggtgagcgcggcggtttgctccagcttatccgtcactttgtcggccaggattttgccatcttcgcagcgcgccagctccacgcggggcgcctgcaggttaccgtccggctggttgcgcgcccggttctggctccagaaggcgcgataggcgatgccttttacctcgaactccacttccgccagacattcggcggtgtcgcgggtcatcaggtcattttgcgcctgggagactttattcaggcgcggcgtttcgtgataaagcgccagacagatggcgtcgagcaaggtagttttacctgccccggttgcgccggtgatggcaaacagcccgttgctggcaaacggctcagcggtaaagtcaattttccactcgcccttgagggagttgagatttttcaggcgcaggctcagaattttcacgcgttttcttcctcgtcattgagcgcatgcagggtatggctgaacagttcgctgagccttgcacgcttcgcatcgtcaatctcctcctgtgagagcctgcgttcaaatacctcttcgacccccagttcactgagcgtttcgcgttgagcgcttagcagaattttctcgcgctgctcgcggctgcggcgcaccagcaagacctctaccggcaggtcttcggtcagcgcctggatttttcgctgcatatcgtgcaggtagtcgtcggtggtgatttcgatgtccagccagatggggggatcttgctcgacgccgcgccactgctccagctgggcggtgatggcatcgagatcgcctttcagcaccgccagcggttgagttacgggcacctccagcgtgtcgacggcgctgagttttccgtcggagaaggtcaccagatgtacggatttggctttgcccgtttcgtcaaagctgagcgaaaggggcgagccgcagtagcggatgtgctcgcagccgccgacgatctgcgcccggtgaatgtgcccgagcgcaatgtagtcggcgggcgggaagtgttgcgccggaaaggcatccagcgtgccgatatagatgtcacgcacggcgtcacttttactggccccgacggtggtgaggtgcccggtcgcaatcaccggaatcggctggtcaccgcgcagggcacaggcttcggcgtgctgctggcggtaatagtcggcgatcgcctgtaacaaatgctgctgcttttccgcgcccgacagccccgcctggctttgcacgatgtcgcgcggacgcaaaaagggaatcggacacagtaccgccccgggcgacccgtcgcgctttttcaggatctgcggggcgtgcccggcgctggcgacgacggtggtattgagaaacgccaggatgtcgcgggattcgttaagcgtcgcgacggaatcatggttgccggcgacaatcaccagatgacagccggtttgctgcagattcaccacgaagcggttgtacagctcacgggcatagctcggcggcgagccggtatcaaaaatatctcccgccacgataatcgcgtccacctcatgcgtccgggccgtttccagcagccagttcaggaacgcttcatgttcagccgcacggcttttgctgtaaaaattttgacccagatgccagtccgaggtgtgaagtatgcgcatagctgatccgtggcaaaaaagagaaagcaggattataaacgttcagagaagggaaaataaccgctgtaataaaacaacagtttgccatttatagtggtactgtttttcataaatctgtcataaatctgacgcataatggcgccgaattacaaacttgtaacgtaaataagataagacagggcaaagtatggcgagacgtattctggtcgtagaagatgaagctccaattcgtgaaatggtgtgcttcgtgctcgagcaaaacggcttccagccggttgaagcggaagattatgacagcgcagtgaaccagctgaatgaaccctggcccgatctgattctgctggactggatgctgcccggcggctccggactgcagtttatcaaacacctgaagcgtgaagcgctgacccgcgacatcccggttgtgatgcttacggcgcgcggagaagaagaggatcgtgtgcgcggtctggagaccggcgcggacgattacattaccaaaccgttctcccccaaagagctggtggcccgcattaaagccgtgatgcgccgtatttcgccgatggcggtggaagaggtgattgagatgcaggggctgagccttgatccgacttctcaccgcgtgatgaccggtgaaaatcccctcgacatggggcctaccgaatttaaacttctgcacttctttatgacccacccggaacgcgtgtacagccgcgagcagttgctgaataacgtctggggaactaacgtgtatgtcgaagaccggacggttgacgtacatatccgccgcctgcgaaaagcgctggaactgagcggccacgatcgcatggtgcagacggtccgcggcacgggttatcgtttttctacccgtttctgaacaatgacaggagtgtgacgcgtgctggaacgtctgtcatggaaaaggctcgtctttgaactgatcttatgctgtattccggccttcattctgggggcctttcttggacatctgccgtggtttctgctggcgtcggtcactgggctgctgatctggcatttctggaacctgctgcgcctctcctggtggctgtgggttgaccgaagcatgacgccgccgcccggaagcggcagctgggagccgctgctgtacggtctgcaccagatgcagatgcgaaataaaaagcgccgccgcgagctgggaagcctgattaagcgttttcgcagcggtgcggagtcgctaccggatgcggtcattctgaccaccgaagaagggacgatcttctggtgtaacggcctggcgcagcagctgttgggcctgcgctggccggatgataatggccagaatatcctcaaccttctgcgttatcccgagtttacgctgtacctgaaaaagcgtgattttacccgtccgcacaatctcaagctcaataacggtcgccatctggagatccgcgtgatgccctacagcgataagcagtggctgatggtggcgcgcgatgtcacccagatgcaccagctggaaggggcgcgccgcaacttcttcgccaacgtcagtcacgaattgcgtaccccgctgaccgtgcttcagggctacctggagatgatgcaggagcaaacgctggaaggtgcgccgcgtgaaaaagcgctgcacaccatgcgcgagcaaacgcaccggatggaaggcctggtgaagcagctgctgacgctctcgaagattgaagcggcacccacgctcgcgctgaatgacaccatcgatgtgccgatgatgctgcgagtcgtggagcgtgaagcgcagacgttaagccacaaaaagcatcacctgacctttgaggtcgacaacacgcttaaggtgctgggcagcgaagatgaactgcgtagcgctatctcaaacctggtgtataacgcggtaaaccatacgccggaaggaacggagatcgtggtgcgctggcagcatatcccaacgggggccgagtttagcgtggaggacaacgggccggggatcgcgccggagcatattccgcgtctgaccgagcgcttctatcgcgtggataaagcgcgatcgcggcagacgggcggaagcggcctggggctggcgattgtgaaacacgcggtgaatcaccatgaaagccgtctcgatattcagagtaccctgggtaaaggaacccgcttcagcttcgtgatcccggaacgattaattgccaaaaagatcgcctgacggcaggtgtgtcattttacctttccacgggtcagccatcgctggcccgtttgctttgcagtcaagcgaaacgcgtctgaattttatacggctggctgttttttgttcgcatgattagccatgggtttttcttataattagcgtattgtgctggagtgtattttcattctggcatattgttctggttttacgatcccaccttgcctttaaacgttataagcgtttaaattgccccccagatactgtcagaccgactgtatttgcgtggtaaatcgaaaaactattcttctccacgccaggacgggagcatatcccgctaaaattgagcaaattttcggctgtatcgtcccgtcaggggcagcgaaaatctcaatgttttcaacaccacatccacaggcagtaaggttttatgacccatcacttaaaatcgcgtgacatcatcgcgctgggctttatgacatttgcgctgttcgttggcgcaggcaacatcattttccctccaatggttggcttacaggcgggtgaacacgtctggaccgccgcgtttggtttcctgattactgccgtgggtctgccggtgctgaccgtcatcgcgctggcgaaagtcggcggcggtgtggatagcctcagcaccccgattggcaaagtggcgggcgttctgctggctaccgtctgctacctggccgtgggtccgctgtttgccaccccgcgtaccgcgaccgtttcctttgaagtgggtattgctccgctgaccggtgacggcgcgatgccgctgttcatctacagcctgatctacttcgctatcgtgattctggtttccctctatccgggcaagctgctggataccgtgggtaacttcctggctccgctgaaaattgtggcgctgattgtcctggcggtggcggctatcgtctggcctgcaggcccgattagcgacgcgatggacgcctataaaaacgccgcgttctctaacggctttgtgaacggctacctgacgatggatacgctgggcgcgatggtgtttggtatcgttatcgttaacgccgcgcgttcccgcggtgtgaccgaagcgcgtctgctgacccgctacaccatctgggctggcctgatggccggtgtaggcctgacgctgctgtatctggcgctgttccgcctgggctccgatagcgcgatgctggtcgaccagaacgccaacggtgcggctatcctgcacgcctacgtccagcacaccttcggtggtgcaggcagtatgctgctggcggcgctcatcttcctggcctgcctggttaccgcggttggcctgacctgcgcctgtgctgagttctttgcgcagtacctgccgctctcttaccgcaccctggtgtttatccttggtatcttctccatggcggtatccaacctcggtctgagccacctgattcaggtctctattccagtactgacggcgatctatccgccgtgcatcgtgctggtggtgttgagcttcacccgcccgtggtggaacaactcctcacgaattattgcgccagccatgtttatcagcctgatttttggtatccttgacgggattaaagcatcagcgttcgctgaaattctgccagcctggacacagcgtctgccgctgtccgagcagggtctggcctggctgatgcctaccgttgttgcactggttctggcggttatctgggaccgtgctgcagggcgtcaggtcgcatcgaacgcccattaatcaacggcaacaaactgtttaaccacggggcttaaggccccgtggttttttgtttttttcgtgttgaatggcaagatttaaatggaaagcactaacaaacttaaacgtggattgagcacgcgccacatccgctttatggcgctgggctctgctattggcaccggtcttttttatggctcggcagatgccatcaaaatggccggtccaagcgtgctgctggcgtacatcatcggcggcgtggcggcgtatatcatcatgcgcgccctcggcgaaatgtcggttcataacccctccgccagctccttctcccgctacgcgcaggaaaacctcggcccgctggccgggtttatcaccggctggacctactgcttcgaaatcctgatcgtggcaatagccgacgtgacggcgtttggcatctatatgggcgtctggttcccggcggtgccgcactggatttgggtgctgagcgtggtgctgatcatttgcgccgtcaacctgatgagcgtgaaggtgttcggcgagctggagttctggttctccttcttcaaggtcgccaccattatcatcatgattgtggccggtttcgggatcatcatctgggggattggcaacggcgggcagccgaccgggatccataacctctggagcaacggtggcttcttcagcaacggctggctcggcatggtgatgtcgctgcagatggtgatgttcgcctacggcggtatcgagattatcggtattactgccggggaagcgaaagacccggagaaatccattccgcgtgcgatcaactcggtgccgatgcgtattctggtgttttatgtgggtacgctgtttgtgatcatgtccatctacccgtggaatcaggtgggtaccaacggtagcccgtttgtcctgaccttccagcatatgggcattgcctttgcggctagcattctgaactttgtggtgctgaccgcgtcgctttcggcgatcaacagtgacgtctttggcgtgggtcgtatgctgcacggcatggcagagcagggcagcgcgccgaaggtgttcgccaaaacctcgcgccgcggcacgccgtgggtgaccgttgtggtgatgaccgtggcgctgctgttctcggtttatctgaactacatcatgccggagaacgtcttcctggtgattgcatccctggcgaccttcgcgacggtgtgggtgtggatcatgatcctgctgtcgcagattgccttccgccgtcgcctgtcgccggatgaggcgaaagcgctgaagttcaaagtaccgggcggggtggcgaccaccgtcgtggggctgatcttcctggcgtttatcattggcctgattggctaccatccggacacccgcatttcgctctacgtgggctgcgcgtggatcgtgctgctgctggtgggctgggtgttcaaatgccgccgcgaccgtcagctggcggaagcgcagtaacatccttttcccctctccccgtgggagagggttagggtgagggcatcaggccgcactgatgcctcctcccccgtcctcctcccccaataaatcccatcatggtgagctatccttaaccaccctgtggcaaggtgacgtcaatttcatcagaggggattcgtgatgttaaacgcctggcaccttccggttgccccatttgttaagcaaaacaaagacaaccttgagattacgctctggctggcgggggaaaaccagcccgatcgcgtgacgctccgcgccgaaatcgataacgaagagaccgggttgaaaatgcacaagctgcgcagccagccgcagccgggtattaccgcctggcgggcgaatatcgatctgaacagcggacagccgcgccgccgctacagctttaagcttttgtggaacaaccgccagctgtggtttaccccgcaggggtttagccgtttcccgcctgcacggctggagcagtttgcggtcgattatccggataacggcccgcagtgggtaaacgatcaggtcttttaccagattttcccggaccgttttgcgcgcagcgaaaagcgcactgccgaccaggataagatctattaccaccatgcagcgggccacgacattatcatgaaagcgtgggatgagccgttaaccgcgcaggcgggcggctcgaccttctacggcggcgatctcgacggtatcagcgaaaagctgccgtacctgaaaaaactgggcgtgacggcgctgtacctcaacccggtgtttaaagccccgagcgtacacaaatacgataccgaagattatcgccacgttgatgagcagtttggcggcgacgaggcgctgctgcgcttgcgtaagaatacgcaaaaagaggggatgcgcctgatcctggacggcgtgttcaaccacagcggcgattcgcatgcgtggtttgatcggcataaccagtcgatgggcggggcatgtcataacccggattcgccgcagcgcgactggtacagctttaacgaggagggccgcgcgctggactggctgggctacccgagcctgccgaagctggatttccagtcgccaacgctcgttaatgaaatctacggcggcgaagacagcatcgtccgacactggctgaaggcgccgtggaatatggacggctggcgtctggacgtggtgcatatgctcggcgaagcgggcggggcgcggaataaccttcagcacgtcgccggcataacgtgctcggcaaaagccgcacagccggaagcgttcgtttttggcgagcactttggtgacgcgcgccagtggctgcagaattatgcggaagatgcggcgatgaactatcgcggctttacctttccgctgtggggattcctcgccaacaccgatatctcctacgatccaaatcatatcgacgcggaaacctgcatggcgtggatggagaactaccgcgccgggctgtcgcatcagcagcagctgcggatgtttaaccagctcgatagccacgataccgcgcgttttaaatccctgctgggcaaggatgtcgcgcgtctgccgctagcggtcacctggctcttcacctggccgggcgtgccgtgcatctactacggagacgaggtggggctggacggcaacaacgatccgttctgccgcaaaaccttcccgtggtcaccagagaaacaggacaaagtgctgttcagcctgtatcagcggctggcgaagctgcgtaagcagagtcttgccctgcgctacggcggctgccaggtggtatacgctcatgataacgtcgtggtctttgcccgcgtttataaccagcagcgcgtgctggtggcgatcaaccggggcgaggcctgcgaagtggtgctggatgattcaccgctgctgaatgtcgctgcgtggaagagcaaagagggcaaggcgacaatacaggacggcgtgctggcgctgcctgcaatatccgcgacgatctggttcggcagctaatacgcgtttgtttccaccttttaagatggcgcaaatgcaacgatttgtgtcaatcttaacagatcgtttacggtgaaggtggaaacatggacgagctttacatccttggctgtttattcctggtttttgcgctgctggttgcgcccgtgcttgcggttatcgggtttaatcgcagtacggcggcgcagcaggagatcgcccggctgcgccagcgcatagaggcgcttgagcagcgcggcgtgcctcagaacgcgtcggaaccggtgcagaccgccgcgccggaggcaattaccgcgccagtggtggaggacgctctcgcgcctgtcgacccctggcgacccgatattcccgcagcggtggcagaacccgcttcttcccaggccccgatccctgcggcaaaacagccttcagcctttggcggcatcctgacgtcgctggcgcgctggttcatgcagggcaatcaactggcgaagctgggcattctgctgctcttccttggcctctctttcctgctgcgctataccgtcgaacattccctgttcccgcttgagctgcgcctcgtggcagcggcgctgtttgccgttgttctgctggcgattgggtggcgactgcggcacaggcagcgggtctatgcgctgatcctccagggcggggcgaccggggtgctttacctgacggtgtttggcgccttccggctctggcaaatgctgccgatgatgctggcttttgcgctgctggtggtgatctgcgcggcgagcgtcgggttggcggtgctgcagaaggcgctgagccttgccatgctggcgagcctcggcggctaccttgcgccgctgctgttgtctaccgggggcggcagctttgtcgcgctgttctctttctatctcctgctgtccatcggcattcttgccatcagcatctggcagcactggcgcgagctgaacctgctcgggctgctgttcacgttcggcgtgggcggcctgtgggggctgagtgattaccagcctgaagactattggatctgccagctgttcctgattgccaatacgctgattttcggcgtgctgagcgtggcgctgtcgctgcgggcgcaggaaaaagggaagcagatcgttgacggtgtgctgctgtttgccccgccgctggtcggttttgggatgcagtacggtatgacgcagcactgggactatggtccggcgctgagcgcgctgggatacggcgcattttatctcaccctcgcgtacctcgcgctgcggcgctatccctccctcggacggccgctggtcatggcagcgctggcgatcggcggcgggttcgccacgctcgccattccgctggcgctgtcggcgcgctggacggcaatggcctgggcgctggagggactgggtattctctggctgggcgtgcagcagcaccagcggcgcatgagctatagcgggacggcgctgctggtgctggccctcggcagcgcgctgtgggcgcaaacggacggcgttacgtcgctgagcctgctccttatcttcgccatcctcagcctttgctggctggctgcggcctggctgtggcggactctttttctgccggtcagctgggcgctgctggcaggcgggctgctgttctggctggtagcgcagctgggtgcgtcgcagcttgtactcacgaaagaattaccggttctggcgggcgtgctggcgctgacggcggcgtcagcctggggctggcggcaggtggccgctcgtctggcgtggcgagagctggacgccagcaaatggctgctgtggccggtaatgctgctgatggtggggtatcagatctggcatcagcagatcgttgccgccggctggtcaaacctggcctggtgcatttcgcttcctgccgcgctgatgctgttgcggcgcgatggtgaaagggttctgccgcgtatcgcgatggggctgcatctgtcgctgtgctggatgattttactggcgctggccgccgagctttactggtttgcccggtctctgacgtggggcatggcggcctggggcagcggattagcgatggccgcaggcggcggggtgattatggcgctctctgctgcggtacggcgtcgcgcgtggccgttccgggaatggcctgcgctctatgcgtgtctggcaccgatccctgccgtcgtggcgctgctggtattgctggtggtgaccaatttccaggacggcgtggtctatcgtcaaacctggctcccgctggtaaacccgcttgaggaaggcgcagcgttcgcgttgctggggctggtgctcttttatcgggcggtggaccgctactacccggcattgcttgcgcaggcgcgtccgtggcctgccgtcgcgctcatggcgtttggcttctggtggctgaacggtgcgctgatgcgcgccctggcctggtacggcgacgtagcctggaatatggcatcgctgtgggattcgcggcttatccagaccagctttgccctgttctggatgctgagtgcgctggtggtcatgatccatgccacccgtcgggcttcccggcaggagtggctctgcggggccgcgctgctgggtgtggtgatggttaagctgatgctggtggacagcgcgggcggaggcggtctgtcgcgcgcggtggcgtttatcggcgtggcgatactggtgctgatcgtgggctatttctcgccgctaccgccaaaaacaggagatgaaaaatgaaatggatgaaagcggtagcgtgtaccgcgctgctggcgctttccggcccggcgttctgtgacgaagtatcaacggaatcgccacgggactacgcctttggtcgttcactcgacacgtccgttccttcccggtggtatcgagtgatgttgccgcttggcgtctatgagcagagcacatccgcggatctgcatgatgttcgcgtctttaaccagtcgggtgagccggttccctttagcctgatcgccgcgacgcgcccgcaggccacagtgcaatccacggcgctgcgcctctttccgctggatgccatgccgctcgcggctgcctcagacgccggtgacagcgataagatccggctccgttcccgaaacggcgttgagattgtgctggaggggcaaaaagccgccgcagccgggcaacattacctgctgagcttgccggagcagacgacgggtgagctggccatatcccagctgcagctgctctggaataccccgcagacgccgtggcagggaacggcgtcggtctattacagcgaggatcttaagcgctggtatacccttcgcgaagatatgccgctgctggacgtcgccagcggccaggatcgccttaagctcgatcggatcgataccgacacggttttatctcccgaggcgaatcgctatctcatggtggtgctgaatacgcagagccagggggtaacgttgaccggcgtaaacgcaatcagcgtacctgcgcaggcggccccggaagagatcaatcttgaggggaaaggggagcagttatcgacaaccgaagcgcagtggcgctggacgcgtccgcagccgctgagcgctgtcagcatctcgctgaacggcgatggcgtccttcccgtggagatcgcgtggcggcgtacggaaaaagacacatggcatcccctgaaaaaagaggtgatttaccgcctggaggggaaaacatccggaccggtttcgcttaacggggacctggtgcaggcagtgaaaatcacgacgctgaatgcgcgtctgccagaatacctgccgagcgtcacggggcatcgcgaccgctatgacctggtgttcaacgcgcagggtaaagcgccgtacgtgctcgcctggggcaacggcgccgcaaagcctgcacaggtggaacctgacatgctgatcccagccgatctgcgcaagacctatgatatggcgaacctgccgcaggccgatattctggatgatgtcgcgttgggcggtgaggggcggctaaacgccacctctgcaggcgagcgggcgagctggatgaacgccctgctggtgtggggcgtgctgatcgcgggcgtgctcctgctggcgggcatggcctggcgcatctggcgggaaacgcagcgcaaggcataaaaaaaggcccgcataagcgggcctttctcgtaaaccgtgccgattacaggctggatacgttctcagacaggtatttagctacgccgtctggggaagcagccataccttctttacctttttcccactgagccgggcacacttcgccgtgctcttcgtggaactgcagcgcgtcaaccatgcgcagcatttcgtcgatgttacgacccagcggcagatcgttcacaacctggtgacgaacgatgccgttcgcgtcgatcaggaaggaaccgcgcagcgcaacgccagcgtccggatgttcgataccgtaagcctgctggatttcgcgtttgatgtccgcaaccattgcgtatttcaccgcaccgatgccgcctttgtcgacaggggtgttacgccatgcgttgtgtacaaactcagagtcgaaggagacgcctaccacttccacgccacgcttctggaattcttcataacgtttgtcgaacgcgatcagctcagacgggcaaacgaaagtgaagtccattggccagaagaacagaacggtcgctttaccgttggtgtgctgtttgaagttgaagttttcaacgatttcaccgttgcccagaactgctgcagctgtaaaatccggagccggacgagttaccagaaccatatgattctcctgtagatactaaggttatttggaacgcaacgcgagccagtatagagagtgttcatggataagacaaagaggtggtgacaatcgttccgccagcttttacctatcaatacgaattctgtcagagctgtttgtttttcgcctgcgccatcatgcgcgggtaaaactgccagaagcgggtctccagcgcatcgtaatgttcatccaggtcataccaggaatcccgcagcgcatccaggcgcgggcgacggctcgccatcccattcaacacattctgaatgaaatccatctcgcgatagcgctccagccagcgctctgaccacaggtagttattcagattcacaaagcgcggcggcgagtcgggcagaatgatcgacacctgctgatgggcataacgcacaaattccggcaggggaagctctggcgagagctgtgcccagtggcgcgacaggaaatggtcccacatcacatcaagcgtgatcggtgcgacgcggcgcgtttccggccgaaaccacgcttttgcttccgtcacttccggcagcttatccgttagcacgtcgatgcggcggtgcataaaaatcccgtcgacaacctcaggggcgtacgcttccgcggggttgccgcgtacgaaatcggccagcaaattgccggacagggagctgtcagcgaggtgagcgagatgcaggtgagcgagaaaattcatgcgttttatttgtccgggggcggctagttgttgcagcaaaagggtgtgagcactagactatgccgcctgtttttaagtcacgagtatacgtcatgcgcgtcgccgatttctcctttgaactacctgaatccctgattgctcactatcccatgcctgagcgcagcagctgtcgtttgctgtcactggatgggccaacgggcgagctgacgcacggtactttcaccgatttgctcgacaagctcaaccctggcgatctgctggtctttaacaatacccgcgtgatcccggcgcgcctgttcggccgtaaggccagcggcggcaagattgaagtgctggtcgaacgtatgctcgatgataaacgtattctggcacatattcgcgcatccaaagcgccaaagccgggcgcggagctgctgctgggcgatgacgagagcatcaaggcgaccatgaccgcgcgccacgacgcgctgttcgaggtggcgttcaacgacgagcgcacggtgctcgatattctgaacgccatcggccacatgccgctgccgccgtacattgagcgtcctgacgaagaggctgaccgcgagctgtaccagaccgtctacagccagaagcctggcgcggtcgcggccccgacggcaggcctgcactttgatgaaccgctgctggaaaaactgcgcgcgaaaggcattgagatggcgtttgtaacgctgcacgttggggcgggaaccttccagccggtgcgcgtggacagcattgaagaccacatcatgcactctgagtatgctgaagtgccgcaggatgtcgtggacgcggtgctggcggcgaaagcgcgcggtagccgcgtcgtggcggtcggtacgacgtcggtgcgctcgctggagagcgccgcgcaggccgcgaaaagcgagttgattgagccgttctttggcgatacgcagatctttatctacccgggttaccagtacaaagtgattgacgcgctggtgaccaacttccatctgcctgaatcgacgctgattatgctggtctccgcgttcgcggggtatcagcatacgatgaatgcctacaagtctgcggtagaacaaaaatatcgcttttttagctacggggacgcgatgtttatcacgtacaatccgcaggctttgaatgagcgtgtcggggaataagtccgcggcaccgttttacaacgttggactgtttttctgacgtcggagaaaaaatgaaatttgaactcgataccaccgacggtcgcgcgcgccgcggtcgcctggtgtttgatcgcggcgtggtggaaacccccgcgtttatgcctgtgggcacttacggcaccgtaaaagggatgacgccggaagaagttgaagccacgggcgcgcagattatcctcggcaataccttccacctgtggctgcgtccgggtcaggagatcatgaagctccacggcgacctgcacgacttcatgcagtggaaaggccctatcctgaccgactccggcggtttccaggtcttcagcctgggcgatatccgcaagatcaccgagcagggcgttcacttccgtaacccgatcaacggcgatccgattttcctcgatcccgaaaaatcaatggcgattcagtacgatctcggctctgacatcgtgatgatcttcgacgaatgcacgccgtatccggccgactgggactacgccaagcgttccatggagatgtctctgcgctgggcgaagcgtagccgtgaccgttttgactccctgcagaacaaaaatgcgctgttcggcattatccagggcagcgtttacgaagatttacgcgatatctctgttaaaggtctggtagagataggttttgatggctacgctgtcggcggtttggctgtgggtgagccgaaggaagacatgcaccgcattctggagcacgtctgcccgcaaatcccggcggataaaccacgatacctgatgggcgtgggcaaaccggaagatctggttgaaggcgtacgccgcggcattgatatgttcgactgcgtcatgccaacccgcaacgcgcgtaacggccatctgttcgttaccgatggcgtggtgaaaatccgtaacgcgaagcataagagtgacaccagcccgctcgattccgagtgcgattgctatacctgtcgcaattattctcgcgcgtacctgcatcatctcgatcgttgcaacgagattttgggcgcgcgtctcaataccattcataatcttcgttattatcagcgcttaatggctggtttacgtaaggctatcgaagagggtaaattagagagcttcgtgaccgatttctaccaacgtcaggggcgggatgttccaccgttgaacgttgattaattttaataatgagggaatttgaatgagcttttttatttctgatgcggtagcagcaacaggcgctccagcgcagggcagcccaatgtctctgattctgatgctggttgtgttcggtctgatcttctatttcatgatcctgcgcccacagcagaagcgcaccaaagagcacaaaaagctgatggactccatcgcgaaaggcgatgaagtgctgaccaacggtggtctggtcggtcgcgtaaccaaagtggctgaaagtggctacattgcaatcgccctgaacgacaccactgaagtggtcatcaaacgtgacttcgtagctgccgttctgccgaaaggcaccatgaaggcgctgtaatcccaacttttcccaaagggaactgccgtgttaaaccgttatcctttgtggaagtacatcatgctggtcgtcgtgattctcgtcggcctgctgtacgcgcttcccaacctgtatggtgaggatccggctgttcaaatcactggcgcgcgcggtgtcgccgccagtgagcaaacgctgatccaggtccagaaaacgttacaagaagaaaaaattaccgctaagtctgtggcactggaagagggcgcaattcttgctcgcttcgacaccaccgacacgcagctccgcgcacgtgaagcgctgatgggcgtgctgggtgataaatacgtcgtggcgcttaaccttgcccctgcaaccccgcgttggctggctgcgatgaatgcagagccaatgaaactcggtcttgacctgcgtggtggcgttcacttcctgatggaagtggatatggataccgcgctcggcaagctgcaggaacagaatatcgacagcctgcgcagcgatctgcgtgataaaggcatcgcttacaccaccgtgcgtaaagaagataactacggcatgagcatcacgttccgcgacagtgcggcgcgcgatcaggctgtagattacctgacccaacgtcaccgtgacctggtaatcacctctcagggcagcaaccagctgcgcgcggtgatgaccgatgcgcgtctgaaagaagcgcgtgaatatgccgttcagcagaacatcaacattctgcgtaaccgtgtaaaccagctgggcgtggccgagccgctggtacagcgtcagggtgctgaccgtatcgtggttgaactgccgggtatccaggacaccgcgcgtgcgaaagagattctcggtgcgaccgcaacgctggaattccgtctggtgaataccaacgttgaccagtctgctgccgcttctggccgtattccgggtgactccgaagtgaaacagacccgcgaaggtcagccggttgtgctgtacaaacgtgtgattctgaccggtgaccacatcaccgactccacgtcgagccaggatgaatacaaccagccgcaggttaacatctcgctggatagcgcgggtggtaacatcatgtctaacttcaccaaggacaacatcggtaaaccgatggcgaccctgttcgtggagtacaaagacagcggtaagaaagatgcaaacggccgtgctgtgctggtgaaagaggaagaggtgattaacatcgccaatatccagtctcgtctgggtaacagcttccgtattaccggtattaacaacccgaacgaagcgcgtcagctctccctgctgctgcgtgccggtgcgctgatagcgccaattcagattgttgaagaacgtaccattggtccaactctgggtatgcaaaacatccagcagggcctggaggcgtgtctggccggtctggtggtctctatcctgttcatgatcttcttctataagaagtttggtctgattgcgacctccgcgctgatcgcgaacctggtgctgattatcggcatcatgtccctgctgccgggagcgacgctgaccatgccggggattgcgggtatcgttctgacccttgcggtggcggtcgacgccaacgtactgattaacgaacgtatcaaagaagagttgagcaacggtcgctctgttcagcaggcgattgatgaaggttataaaggcgcgttcagctctatcttcgatgcgaacgtaacaacactgattaaggttcttatcctgtatgcagtgggtactggcgcgatcaaaggctttgcgattacaaccggtatcggtgtcgcaacgtcaatgtttaccgctattgtcggcacccgtgccatcgtgaacctgctgtacggcggcaagcgcgtcaaaaagctgtctatctgaggagtgcgttgtggcacaggaatatactgttgaacaattgaaccacggccgtaaagtctgggactttatgcgctgggactactgggccttcggcatttcaggtttcctgctgattctgtccatcgtcattatgggcgtgaaaggctttaactggggtctcgattttaccggtggtacggtaattgaaatctccctggaaaaaccggtcgatatggaccagatgcgcgaatcgctgcagaaagcgggctttgaagagccgctgctgcagaacttcggcagcagccgcgacatcatggtgcgtatgccgccggtgcacgatgctaacggcagccaggagctgggcagtaaggttgttagcgtgattaacgaaacaaccagccagaacgcggcggttaagcgtattgagttcgtcggcccaagcgtgggtgctgacctggcgcagaccggtgcgatggcgctgctggtggcgctgatctccatcctggtatacgtcggtttccgctttgagtggcgactggcggccggtgtggttatcgctctggcgcacgacgtggtgatcaccatgggcatactgtcgctgttccacattgagattgacctgacgattgtggcatccctgatgtccgtcatcggttactcactgaacgacagtatcgtggtatctgaccgtatccgtgaaaacttccgtaagatccgtcgcggtacgccgtacgaaatctttaacgtgtcgttgacccagacgctacaccgtaccttgatcacatccggtaccaccctgatggtgatcctgatgctgttcctgttcggtggtccggttctggaaggcttctcgctgaccatgttgattggtgtcaccatcggtacggcgtcgtctatctacgttgcgtccgccctggcgctgaaactcggcatgaagcgcgagcacctgctccagcagaaagtcgaaaaagaaggggcggatcagccgtccattctgccgtaagacgacgtttagcgcgttatcaaaatcccggtctgttgaccgggattttttttatctgctcctgacaaacactcctgacagtatgctgtcaggagccctgtcgtagactccttctgaacccaaacaacaggcaggaggatgtatgaaaagcgtcattaactggtttgaaattccggtctcggatatggatcgcgccatcaaattttatgagccggtgatgcagcttgcgctgcgtcgcgagaaaatggactgtgcggagctggcggttttcccgcatgaggatcccgccaccggaggcgcactggcaaaatttgacggcgttacaccgtctttgcagggcgctattatttacctgcatactgacaatctggcggcaacgctcgatcgcatcgcctctgcgggcggcgagtgcgtgtttggcccgctggaactgccgcatggcattggcactatcgccttgtttaccgacagcgagggtaaccgcgtcggcctccatcaacctgcctgagagcgaactaagaaatgacgcgacgcgctgaccgtttgtttcagattgtgcagatcctgcggggcaggcgtctgacaacggcagcgcatctggcggaccggcttggcgtgtccgagcgtacggtctaccgcgatatccgcgacctgtcgctttccggcgtgccggtggaaggcgaggcggggagcggatatcggctgatgtcgggctttgacctgccgccgctgatgctgacaaataaggagtccgaggcgctgatcgtcgcgattcgcctgctcaaaacctggggcggggaatcgctgtcgcgcgagctggagtcggctcaggaaaaggtgctggcgattctgcccgaggagagtcgtcgaaaggcggagcagacgcggatctacgccccggatttttgcatgcaaagccactcccgcagcgattttgacaggatccatcaggcaatttccgcccagcaggtgctggcgctgcattaccgtgatgaagcaggacagttgtctaaacgtgaggttcagccgctggggctgttcttctggggagagcgctggctgctggcggcgtggtgtgaacggcgcgatgactatcgctgtttccggctcgacagatgcctcaatattgtggctacggaaaggcggtttagcgaaagtgcggacaggtctttggcggattttttgcgcaaggtgaggcagtaaaaagccgggtggcggctacgccttacccggctaaatttggctcgtaggcccggttagcgtagcgccaccgggcgaaacccgcactgattagaagttgtaacctacaaccaggtaaccaccccaaccggtagaacgcacgctgaagtcgccgttgccaaagttcaggctggcgtcgtcgttccactgaccaccgttgtgccagtaacgtgccacaacagagtagtgccagtgatcgtagttcagcgccagaatgtggctggaggcgatggagttattggtacgcgctttcttaccgttcaggtcacggaaatcgttgtcacccaggtctgagccccagtcaaagttggtgaagccgatatagctcaggttaccgccccacagttgggtaattggcacaaagtatttcactttgaaacggtagccatcccactcgttttcgttcgcggcaccgtagttctgccactgatacttagcgtacacgttcagagacaggctcattggcaggccggtgtcgatgtccgtacccagacccatataccaggtgctttgttcctgagaatcgttgcggcccatgtcgtaaatgtagttattcgcgaagtaccactctttgaacggcccgaagcttaggtcggtgccggtcagcttatcgatagagaagcgtggttcgatttccataaacagcggagagccgttgttccagatacctttcgcatcggtgttaccaccaaagaatactggcagatcgacgtagccgtagaaatcaaaccagtctttcttggcgaacgcttcatattccaggtaggtatcgttacgaatctgaggtccgaaacgcgtgtggtagctgccgaccacgttaacgctctggtgccaccagtcggagaggtattgtggtttgtcgttttccgctgcgttaacagtgaaagaagaggacagtgccagcacggcgccagctgcgagtaatgtttttttcataatcatgccactgattgaaattcccttccgggagtgaaaaatgcgcgaattgcgtttctaaatatttcgtgtttctgcggtgcctattataggaatccctgctcacaaaaatatgtgttgtttcacatatctctcatacgcgtaatcgattgcgttcacgtttgcgtactttaaacggccgggattgtagcggcaatcatttatgttgccaatccatacgaaatgtaaatgttagcggagtgacatttcactccgctaaaaaagagaggattactgcgcggcgggttgaatgtcgtgaatgcggataaagcctaactgttccggcgtaaggccgcttaactgaagcggaatatccacatcactgggtgctaaaacactggccggtgcggtgaagagctgattcttcacgttcacctcctggtagttctccgtggtgccctggatctggccccactcgacggtgccgctgaaggccggaagcggatcgttggactctcccttgatgcgtaatgttgcacgagtaccatcggcattcgccgccacattcaccagagacatttttagcgtgccaatctggctgttcagcagggcaggcgtattcgcccccggcagcaggtacaccccgctggtagatttcgcgttcagcgcgttttgctgggtgatcttcaccgtttctttgtttagcttgtccatcgccgtgttgagcgaattgacgctctgtttcatctgacggacttcggtttgctgtgcacaggcgctaagggtgaagaggctccccaccagcaatattttcaggtaacgtcttgtcattgcgtttatttccttgaaataacggatcgtcctaatggtagccagcatcattgtgtcagacatagatcctttttctcaaaaagctcttcctttgttgtcaggccagttcagggtaaaatgaaaatcagttaaccagataacagggataccgtatgcattgcccattctgctccgctgtggataccaaagtcatcgactctcgccttgtgggcgaagggtcttcagtgcgccgtcgtcggcagtgtctggtgtgtaacgagcgtttcacgacctttgaggtggcagagctggtcatgccgcgcgtggttaaaagtaacgacgtgcgtgagccgtttaacgaagagaaactgcgcagcggaatgctgaaagcccttgaaaaacgtcccgtcagcgcggacgacgtggagatggcgctaaaccacataaaatcttaccttcgtggtttgggtgagcgagaagtgcccagcaagatgatcggcaacctggtaatggagcagctgaaaaagctcgataaggtcgcctatatccgctttgcctcggtctaccgcagtttcgaagacatcaaagagtttggcgaagagatcgcccgcttacaggattaagctcatgcacgatgagatgtacatggcgcgcgccatgaagctggcgcagcgcggtcgttttaccacccatcccaacccgaacgtcgggtgcgttatcgtgaaagatggcgagatcgtgggggaaggttttcactaccgcgcgggtgagccccatgctgaggttcatgccctgcgcatggccggcgagaaggcgcgtggtgcgacggcctacgttacgctggagccctgcagccatcacgggcgtacgccaccgtgctgcgacgcgctgattgccgcgggggtgtcgcgcgtggttgcatcgatgcaggacccgaatccgcaggtggcgggacgaggtctgtatcgtctgcagcaggaaggcattgacgtcagccatggcctgatgatgcaggacgcggaagcgctcaacaaaggtttcctgaagcgcatgcgtaccgggttcccgtatatccagcttaagctgggtgcctcgctggacggtcgtacggcgatggcaaacggcgagagccagtggatcacgtcgccgcaggcaaggcgcgatgtgcaacgtctgcgtgcgcaaagccatgctattctcaccagcagtgaaaccgttctggctgacgatccggccatgaccgtgcgctgggacgagctgaatgccgatacccaggctctgtatccgcaggagaacctgcgtcagccgctgcgtattgtcattgatagccagaaccgcgtgacgccggagcaccgcatcgtccagcagccaggggaaacctggattgcgcgcaccaaagaagatacgcgcgcatggccggaaggcgtacggagcattacggtgccggaacataacgggcatctggatctggtggtgctgatgatgctactcggcaagcagcaggtgaacagcatctgggtcgaagcgggcccgacgcttgccggcgcgctgcttcaggcggggctggtggatgagcttctcgtctacgttgcgcctaaactgttgggcagtgacgcgcgcggcctgtttgtgctgcccggccttgaaaaactggccgatgcaccacaactcaaatttagcgagattcgtccggtaggtccggatgtctgcctccacttaacgacagcgtaattgctcccgaaatagggaagcagtgcgcaaagtattatgataaaatccgcccccctgcggggccaaatgaacccgtaaaggaagagtatgaacattattgaagctgctgtagctaccccggacgctcgcgtcgccatcaccattgcgcgtttcaacaacttcatcaacgatagcctgctggaaggtgcggttgacgccctgaaacgtatcggccaggttaaagatgacaacattaccgttgtttgggttccaggcgcttacgaactgccactggcggcgggcgcgctggcgaaaaccggtaaatatgacgcggtgattgcgctgggtaccgttattcgtggcggcactgcgcacttcgaatacgttgcgggcggtgcaagcaacggtctggcacacgttgcgcaggatgctgaaattcctgtcgcgttcggcgtgctgaccaccgaaagtattgaacaagccatcgaacgtgctggcaccaaagccggtaacaaaggtgcagaagctgcactgaccgcgcttgaaatgatcaatgtattgaaagccatcaaggcctgattttttgtaaggggaattccgtgaaacctgctgctcgtcgccgcgcccgtgaatgtgccgtccaggcactttactcctggcagttgtcccagaacgacatcgctgatgttgaataccagttcctgtcagaacaggacgtgaaagacgttgacgttctgtacttccgtgaactgctgtcgggagtggcgactaatagcgcgtatctcgatggtctgatgaaaccttacctgtcccgtctgctcgaagagctgggtcaggtagaaaaagcagtgttgcgcattgcgctgtttgagctgtctaaacgtgatgatgtgccgtacaaagtggccatcaacgaagcgatcgaactggcgaaaaccttcggcgctgaagacagccacaagtttgtaaacggcgtacttgataaagcagcacctgcgatccgtccccacaaaaagtgatccgcaaaccggagttctgcattgcctgacgggcagtgcggctccggttttttcttttatttgctgaggcataacgtatggcatgcggcgaattttccctgattgcccgttatttcgaccgtgtcagaacctctcgtcttgatgttgaaaccggcatcggcgatgactgtgcacttctcaatattcccgaaaaacagacgctggcaatcagcaccgacaccttagtgtgcggacgtcattttttaccggatatcgatcctgccgatctggcgtataaggcgctggcggttaacgtcagcgatctggcggcgatgggggccgatcccgcgtggttaaccctggcgctgacgctgcctgaggtagacgaagcctggcttgaagcattcagcgatgcgctttttgagcagcttaactactacgatatgcagctgattggcggtgataccactgccgggccgctgtcgatgacgctggcgatccacggctatgtaccgcttggtcgcgcgctgaagcgttcgggtgcaaaacccggtgactggatctacgtgaccggtacaccgggcgacagcgccgcgggcctggcgattcttcaggatcgcttaaccgtgaagaacgctgacgatgcggcgtatctggtgaaacgccatctgcgcccgacgccgcgtattctgcacggtcaggcgctgcgcgagcgggcaagctcggctatcgatctctctgacgggctgatctcagatcttggccatattctgaaggccagcggtgtcggcgcgcgcgttgacctggagctgttcccgctgtcagaggaactgcttcgtcatgttgaacctgaacaggcactgcgctgggcgctgtccggtggtgaagattatgaactgtgctttaccgttccggagctgaaccgtggaacgctcgacgtggcgttagcgcatcttggcgcgaaattcacctgtatcgggcagatcatgccagagagtgaagggctgaagtttgtgaaagacggtgcgccggttacgctggactggaaagggtacgatcacttcgcgtgagtttgtacgctctgtaatgccgggtggcggctccgccttacccggcctacaaaagagagggcttatttaaaccccaccaccggatgctgctgatacggcgtctccagctcggcaacctgttccggcgtcagcgtgatatccaccgcgtttaacagttcgtccagctgctcttcccgggacgtgccgacaatgggagccgcgacgccgcgtttacccagcagccatgccagcgctacctgggcgcgggttgcgccggtatcgtcggcaatcccggccaggcgttcggcaatcagcgcatcgctggcttctgttccgccgtacagatttttccccacctcatcggataccagccgggccgtggtttccccccacggacgggtcagacgtccgcgcgccagcgggctccaggggatgaccgccacgccctcctgatggcacagcggcaacatctcacgctcttcttcacgatagatcagattgtagtgatcctgcatggtgacaaagcgcgcccagccgtgctgcgcctgcagatccagcgcctgagcgaactgcgacgcgtgcatcgacgatgcgccgatgtagcgtgctttaccggctttgacgacgtcgttgagcgcctcaagcgtctcctcgatcggcgtgttgtaatcccagcggtgaatttgcagcaggtcgacgtaatccatgttcaggcgcctgaggctgtcgtcaatggaacgcaggatctgcgcgcgagaaaggccctgcggcaggtcccccaccgggtagtagaccttggtggcaacgacgatgtcatcccgacgggcaaaatcgcgcagggcgcggccgacaatctcctcgctgctgccgtcggagtagctgttggcggtgtcaaagaagttaatgccgccctcgatggcgcgtttgatgatcggacggctgctctcttccggcagcgtccaggcgtggttcccccgatcgggctcgccaaaggtcatgcatcccagacaaagtcgggaaaccttaaggtccgtttttcctaatgttgtgtattgcacggttccgctcctgctgtttaaacaatacgtttaagcatagcaggagcggaaaaggggggagggatcagtccagccaggcgcggattttagcttcgataccggcagcgtccaggccaatcgccgcgcgggcttcgtcctgggtaccttgcgggatgaagtagtccggcaggccgaggttcagcaccggaacggctttacggtttgccatcagcacctcgttcacgccgctgcccgcaccgcccataatcgcgttctcttccagcgtgaccagcacgtcgtgcgcctcagccatactcaggatcagggattcgtcgagcggcttcacaaagcgcatatccacgagggtggcattcagcgtttcagctactttagccgcctctggcatcagcgtgccgaagttcaggatcgccactttctcaccgcgacgtttaaccagagctttaccgatcgccagcttctccagcggctgcagctcaacgcccaccgcattgccgcgcggatagcgaacggcgcttgggccatcctgatagtggtagccggtaaacagcatctgccgacattcgttctcgtcgcttggcgtcatgatcaccatatccggaatgcagcgcaggaacgacaggtcaaacgcgccctggtgcgtctggccgtcggcaccgacgatgcccgcacgatcgatagcaaacagcaccggcagcttctggatcgccacgtcgtggatcacctgatcgtaggcgcgctgcaggaaggtggaatagatagcgacaaccggtttgtagccgccgatcgccaggcccgctgcaaatgtcaccgcgtgctgctcggcaatggccacgtcgaaatactggtcagggtattttttagagaactctaccatgccggagccttcgcgcatggccggggtgatcgccatcagcttgttgtcttttgcggcggtttcgcacagccagtcgccgaagatttttgaatagctcggcatgccgccgctgcttttcggcagacagccgctggacgggtcaaatttcggtaccgcgtggaaggtaatcggatctttttccgctggttcgtagccacgcccttttttggtcatgatgtgcaggaactgcgggcctttcaggtcgcgcatgttcttgagcgtggtgaccagccccagtacgtcgtggccgtcaaccgggccaatatagttaaagcccagctcctcaaacagggtacccggcacgaccatgcctttgatgtgctcttcggtacgcttaagcagctctttgatcggcggtacgccggagaagacttttttaccgccttcacgcagcgaggagtaaagcttgccggagagcagctgtgccagatggttgttcagcgcgccaacgttctcggagatcgacatttcgttatcgttgaggataaccagcatgtccggcttgatgtcgcccgcatggttcatggcttcgaaggccatacccgcggtgatggcgccgtcgccaatcacgcagacggtgcggcgctgcttgttctctttctcggcggcgacggcaataccgatgcccgcagaaatggaggtggaggaatggccgacgctcagcacgtcatactcgctctcaccgcgccacgggaacggatgcaggccacctttctgacgaatagtgccaattttatcgcgacgtccggtcagaattttgtgcggataggcctggtggcccacgtcccagatgagctgatcgaacggcgtgttatagacgtagtgcagcgccacggtcagctctaccgtgccaagcccggaggcgaaatggccgctggagcggcttacgctgtcgagcaggtagcgacgcagttcgtcgcacagcttcggcaggctctctttcggcaacagacgtaactcctgggtggagtcaactaacgccagtgtcgggtatttggcaatatcaaaactcatcaaaggctcatcgagatatatagtttatttatcacgctggattatatagtccgctagcgcttccagtgccgaggtatccagcgattgcgcagccagttcattcagtgactggcgggcatcgtcaatcagatcccgggctttacgttgggcttgctcaagacccagcagggcggggtaggtacttttgccaagctgctggtccgcaccctgacgtttacccaatgttgcagtatcgcccaccacatccagaatgtcatcctgaacctggaatgccagaccgatactctctgcgtatctgtccagaatcggcagggctttgcgcccttgctcacccgcgctcagcgcgcccaggcgaacggcggaacgaatcaatgccccggttttatggcgatgaatacgctccagctgttccagattaacctgacgtccttccgcttcaagatccagcgcctgaccgccgcacatgccggccacgccgctggccatggccagttcggaaatcattgccagacggtcacggtcagccacttcggccattggcgcgtcgctcagaatcgagaacgccagcgtctgcagggcatcacccgccagaatagcattcgcctcgccaaacttgatgtggcaggtaggttgaccccgacgcaaatcgtcgtcgtccatcgccgggagatcgtcgtggatcagcgagtaggcatggatgcactcaacggcggctgccggggcgtccagcgtgttatcgctgatgccaaacatgttgccggtggcgtacaccaggaacgggcgcaggcgctttccacccaagagtgcgccatagtgcatggcttcaaccagaggagtgttctgaaaaggctgtggcgcaataaatcggcgcagggcgtcgttggcacgcacgacgcgcgcctgaagctcgttggcaaaatccatttactcggcgtccggtgtgaaaggcgtggttttcgcgtcttcgctgtcggaaagcaggatctgcacgcgctgctcggcctgctgcagtttgacctgcccctggcgcgccagctgcacgccgcgctcgaattcgttgagcgcctcttccagcgggagatcgccgctctcaagacgggtaacgatttgctccagttcactcagcgcagtttcgaaactggccggtgcgtcgttcttcttcggcatagtgaattgactcttatattctcagccccgacatggtaacggactcagggcaattatcaaataacgcgcaatgtgcacaggagcggcgcgatggtggtatacttgcgcgcctggatgcagccacgggtgtgggctgctgtactcttttccattacaagccttaatacgcttgcctaagaaacattgccgccatgaagtttatcattaaattgttccctgaaatcaccatcaaaagccaatctgtgcgtttgcgctttattaaaattctcaccgggaacattcgtaacgttttaaagcactacgacgaaaccctcgccgtggtgcgccactgggaccacgttgaggtccgtgcgaaagacgaaaacaaacgtcaggatattcgcgacgcgctgacccgtattccggggatccaccatattctggaagtggaagatgtcccgttcagcgacatgcacgacatcttcgaaaaagcgctggttcagtaccgcgatcagatcgaaggcaaaaccttttgcgtgcgcgtgaagcgtcgcggtaagcacgaattcagctccattgaagtggaacgttacgttggcggcggtttgaaccagcacgttgagacggcgcgcgtgcgtctgaccaacccggacgtgaccgttaatctggagatcgaaaacgatcgcctgctgttggtgaaaggccgctatgaaggtatcggcggcttcccgatcgggactcaggaagatgttctgtccctgatctccggcggcttcgactccggcgtctccagctatatgctgatgcgccgcggctgccgcgtacactactgcttcttcaacctgggcggcgcggcgcacgaaatcggcgttcgtcaggtggcgcattacctgtggaaccgcttcggcagctcccaccgcgtgcgtttcgtggcaatcaatttcgaaccggtggtcggcgagattctggagaaagtggacgacggccagatgggcgtcatcctgaagcgcatgatggtgcgtgcggcatccaaagtggctgaacgctacggcgtgcaggcgctggtcaccggtgaagcgctggggcaggtctccagccagacgctgaccaacctgcgcctgatcgacaacgtgtctgataccctgatcctgcgtccgctgatctcccatgataaagagcacatcatcgatctggcgcgcgaaatcggtaccgaagattttgcccgcaccatgccggaatactgcggcgtgatctcaaaaagcccaacggtgaaagcggtgaaggcgaagatcgaagcggaagaagagaacttcgatttcagcattctggataaagtggtggaagaagcgtccaacattgatatccgcgagatcgcccagcagaccgagcaggaagtggtagaagtggagaccgtgagcggtttcggcgcgaacgacgcgattctggatatccgctccattgacgagcaggatgacaagccgctgcaggtggatggcgtcgaagtggtttctctgccgttctacaagctgagcacgaagtttggcgacctcgaccagagcaaaacgtacctgctgtggtgtgagcgcggggtgatgagtcgcctgcaggcgctgtatctgcgcgagcagggctttgccaatgtgaaggtgtatcgtccgtagtttctcgcccggtggcgcttcgcttaccgggcctacggtaccgtgcatttgtaggccgggtaaggcgtagccgccacccggcttttttttatgcactactcttcatagtaattataaatccccgctggcatcaccagtgacgatgccacttcgtacgccttctcgcgcccgaccagcaggtcgataatctttaagccaaaatcaatcgcggtgccggggccctggctggtcagcaggttgacgcgcggatcccagacgacgcgtttgtccacccactgatcttccggaatggtgtctttcaggcccgggaagccggtcatgttgccaatggggaagatatcgtgtggaaccaaaaccgttccggcggcggcacaaatggcggcgacgatgcggccggataaatggaactgacgcacggtctcaaccagcagcgggctgtcacgaaaacattccgcgcccttcagcccaccgggcagcacgatgatgtcgtaatctccgtcagccacctgtaccaacggtgcatctgcaaggattttcaccccgcgtgaacaggtgattgccagattaccgtcgctggcgacgctggcggtggtgaccttaatgccgccgcgcaccatcagatcgatggtggtgaccgcctccatctcttcgctaccaggggcgaggcagatcagtgccgacgcgctcatattcactctccttacgtttaaccaggtcatacagacgggcgttttccggcaccgcgatgccgtgtgcgcgggcgcgttttagcagatatcccgtaatgtagtcgatctccgtgtggcgtaatgcccgaacatcctgcagcatcgaggagatgttctcagctgtactctcaataacctgctcgacataacagcgtaaatcgtctgccgaggtatgcagcccttcccgctcaacgaccgccgcgacttctgcacagagggacgccacctcctgcggatggtttttcagttcaccgttcgggcagttccacagcgccgtcagcgggttgatcacacagttaacggccagcttgcgccagagttgagggcgaatgtggttatgccaggccacgtccgggagcaccttctgcagcacatcggcaagatagctgtagtccccatcctgcgttctggcaggcccgatgtgcgtcacgccgctggcgacatgcacgatgatgttgccgtcgcggcgcgcagcgtgggtggtcgttgccatcagcaggggctgcggaacgcttttcagctcatccagggttcccatgccgttatgcagcagcagtatgggcgaagtgggggggagctgcgcggccagcgtttttaccgcgtctgagacctgccaggctttaagcgtcaccagtaaaaggtcgctttgcgccaggaaatcaggatcgttcgcggtgagggattcgttaaagatgcttccgtcttcaccaatcaggtttacactgcaataaggctggggcacgcgcagccagccctgaacctcatgtccgtgcttgcacagtgcggtcagccacagctgaccaagcgctccgcatccgagcaccgtaattttcattgttcctcctcacctgcaactgcgccaggtgttacagcttaattatacagctaagcttctgttgagttatgcctcgtagcgggtattatgcaacgcaacaaaagtgaagggagaagaaaagatgccatctttcgatattgtttccgaagttgatatccaggaagttcgcaacggcgttgagaacgcaacccgcgaagttgagtcacgtttcgattttcgtggcgttgaggcgtcgtttgagctgaacgacgcaaataagaccattaaggtgctgagcgagtctgatttccaggtgaatcagctgctcgacattctgcgcgccaagctgttgaagcgcggcatcgaagggacctcactggacgtgccggaagagttcgtccacagcggcaaaacgtggtttgttgaagcgaagctgaagcagggcatcgagagcgcggtgcagaagaagatcgtgaagctcatcaaagacagcaagctgaaggtgcaggcgcagatccagggcgaggaaattcgcgtcaccggtaagtcccgcgacgacctgcagtccgtgatggcgctggtgcgcggcggcgacctggggcaaccgttccagtttaaaaacttccgcgattaatataaaaagcccggtttacccgggctttttttcaggctttgagcgtctgctcgacctcaaagcgattggtcaccttgctgtcaattttgacataagcgctgcgctcctcgggaacaatcagcacctccgtgaccccttcttttgcttccagacgctgtttcagcgcgtcgctaatctccacatcatccgggatttctacgcgcaggctgctcacgtagcgcggctctttcatggtgccggcaaccagcagccagactgttgccagcagcgcgcccgcgagaaacacggtttgtgaatcaaacaggccgtcgacccagccgccaagcgagccgccgatcgccacgccgaggaactggctggtggagtaaatacccatcgccgtgcctttgtaaccggcgggggactctttgctgatcagcgacggcagcagggcttccatcaggttaaatgccaggaagaacagctgcacgccggcaatcagctcccagaagtgcgggccggcaccccagagcacgatctcggcaatcagcaggaccgccacgcaccccacgaagacgcgcttcattttgcgcttcacttcagcgtagatgatgaacggcacgacggagacaaacgaaatcagcatcgtaaccagatagattttccagtgctcagccgccgggaaacccgctgcggcaagctggccgggcagggcaacaaaggtcgacatcagcagaatgtgcagacacataatgccaaaattcagcttaagcaggcgcggctcgacaattactttgctgaagcagccttttaccatgccggattcacggttcagaacgtggtttttgctgtccggcaccacccacagggttaaggcaatgccgagggttgccagcacggcaatcatccagaacagggcgtgcaggccgagcgcatgggtgattatcgggcccagcaccatcgcaatcgcaaacgtcacgccaaagctgacgccgataaaggccatggctttggtgcggttctgctcgcgagttaagtctgacagcagcgccatcaccgcggcggcaatcgcgccggagccctgcagggcgcggccaagaataatccccaagatggagtgggagagggcggcaatgacgcttccgagcacaaagaccagcagcccgccgacaatcagcggtttgcggcccacccggtcagagagcaggccaaacgggatctggaacaccgcctgcgccagaccataaatgccaatggcgaggccaatcagcgcctcgctggccccctgcagcgccataccgtacgtggtcagaacaggcaggaccataaacatgccaagcatccgtagcgagaagacagtccctaagccccaggtcgcgcgtagctcgcctggcgtcattttataatcgttcattaccacctcagttcaaaagcaggccatagtgtagtgcggggaaggggcggggtaaataaagggttatttaacaaatattacatgcgttattaatggattttatgaataaaaaaagggtgccgaagcacccctttattcacctgttgtggcttaccagacgtaagtcagcaggttatgtgaatctggcaccatgaagtccacggacatcatcacggacagcgaggtgatggccacaatcgagaacacaaacagcttgcgcgcccagactttgtcatcttccactttgtaaccgcgcagcgccatgccgagccaccagacgctcaccgcagccgctaccgccagatatttgtatccggcgtaaccacccagagagagcatcagcgttgccacggcaaaggcgatgatgtacagcgtgatgtggttcttggcaacggagatgcccttcacgaccggcagaaccgggatgttcgccgcctgataatccttaaagcggaaaattgcgatggcataggagtgcggcatctgccacaggctaaagatagccagcaggatcagcgcaccgctgtcgaactcgttcgtgaccgcgcagtagccaatcaccggcggcgcagcgccggagagagaaccaatcagcgtgccgtagacggagtgacgtttcatatacaggctatagatgcccacatacaccacgaaccccatcacccccagccagcaggccagcgggttagcaccaaaccacagcagcataaagccagcaatacccagcaaggtggcgtacaccagcgagacggaaggggcgatcaggcctttcaccagcacccgatttttggtcctttccatcttcttgtcgatatccatgtcgatgtagttgttaaatacacaaccggacgcaacaaccagtgacacaccgaccagcgtgtagataaagagggcgtaatcaatgctgcccttagaggccagcaggaaccctccgatcacggagatcaggttgccaaagatgatgcctggtttcgttacttgcaggtattgcttaaacatactcgccgctcttagtgaaccatcatgttgtagttgaggttccacataatccagatggaaccgactaccaggatagcgatgataatcacggtaaagataaaggcggtcatgttccagccttcatcggacttggtgttcatgtgcaggaagcaaaccagatgcaccagaatctgaatcaccgcggtcaccaggattgcccccaggataaccggtttagacgcagaaccgctcatcaccatccagaacgggatcaccgtcaggatgatcgacaggatgaaacctgtcatgtaggtttttacgctgccgtgggaagcgccatgatcgttagaatgactcattacatcgcccccatcagatagacaacagagaacacacagatccacaccacgtccaggaagtgccagaacaggctcaggcacaggatacgggtacggttagtactggtcaggccgcgacgggagatctggaacatcagtactgccatccagatcagaccggaggtcacgtgcagaccgtgggtgccaaccagcgcgaagaacgcggacaggaagccactgcgatccgggccgaagccttccatgatcaggtgatggaattcatagatttccatcccgataaatccagcaccaaacagccaggtcaacgccagccaggagacaacctggctcttgttgtttttgtacatggcgatagccgccatgccgtaggtgatggagctgaataacagcagtgcggtttcaaccagaacgaacggcagttcaaagatgtccttgccggtcgggccgcccgctgtgccgttcaccagaacggcataggtcgcgaacagacagcagaacagaatgcagtcgctcatcaggtagatccagaaaccgaagactttggtcggtcctgtatcgtggtgcgcatgttcatgcgcgtgggcagttgagtgcgccagagtatcagttgccatttttcagccccgctttagaaatctcgtcgaaatgctgattttccagcttttcaacttcacggactggtacgtagtagtccacgtcctcgtcaaagctcttcacaatccagctgattacgatgccagcaaagccaacaatcgccatccaccagatgtgccagatcattgcgaaaccaaataccgttgcgaaggcggcaatgacaatgcccgcaccgctgtttttcggcatatgaatctcttcgtaatgagcaggttgcttgtacgcttcacctttttctttcatttcccagaatgcgtcacgttcatgaacctgaggcacgatggcaaagttatagaaaggcggtggagaagaggtcgcccactccagcgtacggccaccccatgggtcaccggtcaggtcacggttctggtcgcggtcgcgaatagacacgtagaactgaatcagctgagacgcgataccacaggcaatcagcacggcaccgcccgctgcaatcatcagcattgggtggaactgcggatcaatctgctggctcagacgacgggtcatacccatgaagcccagcacgtacagcggcataaaggcgacgaagaagccgatgatccagaaccagaacgcgcgtttaccccatttttcattcagcgtgaagccgaacgcttttggccaccagtaggttacgccagcgaagcagccgaagaccacgccaccgatgataacgttatggaagtgcgcaatcaggaacagactgttgtgcagaacgaagtcagcacccggtaccgccagcagtacgccggtcatcccacctacggagaaggtcacgatgaagccgatggtccacagcattgctgagtggaacacgatacggccctgatacatggtgaacagccagttgaagatcttcaccccggtcgggatggcgataatcatggtggtaataccgaagaaggcgtttacgttcgcgcccgcacccatggtgaagaagtggtgcagccaaacgatgaacgacagaacggtaatacacacggttgcccacaccagagaggtgtaaccaaacagacgtttacgcgagaaggttgccgcgatttcggagaacacaccgaatacaggcagaaccaggatgtaaacttccgggtgaccccatgcccaaatcaggttgatgtacatcatcatgttgccacccatatcgttcgtgaagaaatgggtgcccaggtagcggtccagggtcagcagcgcgatggtaacggtcagaattgggaaggacgcaataatcaggatgttggcgcacagagatgcccaggtaaataccggcatcttgaacatggtcatgccaggggcacgcatcttgataatggtcacgaagaagttgataccggtcagggtcgtaccgacaccggagagctgaagcgcccaaatccagtagtcgacgccaacgcccgggctgtactcaattcctgacagcggtgggtaagccagccagccggtctgcgcgaattcgcccacacccagtgacaggttaaccagaataacgccgacaacggtgaaccagaagctcaggttgttcaggaacgggaacgcaacgtcgcgcgcgccgatttgcagcggaacgaccacgttcatcagaccgataaccagcggcatcgccacgaagaagatcatgataacgccgtgggcggtaaagatctgatcgtagtggtgcggtggcaggaagccggcttcacccgcagacgcgagcgcctgctggctacgcatcatgatcgcatccgcaaagccacgaattaacatgacgataccgacgatgcagtacatgataccgagttttttgtggtcaaccgaagtcagccactcattccacaggtagctccacttaccgaagtaagtgatcaggccaactaaggccgcgccaccgatgataattgcagccaccgtaaccatgataatcggttcatggtagggcactgcatccagtgtcaattttccgaacattttcttcctcggccccttagtgagcggtttccgcgtggctcatgtccatgccttccataccttcgtgcgcgctgtgctcgccttctggctgggtcatgtccatgctcttgccgtgatccataaatttgccaataacgtctttgaacaaatcaggcttcacgttagagaagtactccaccttgttgtattcgctaggtgcagccactttttcgaacgccgccatgtcagacatggtgtttggagactgtttcgctttttcaacccactggtcgaaagcggcacggtctggcgttgcaatagctttgaacttcatacctgagaagcccgggccgctatagctggcggagataccatcgtaggtgcctgcttcattcgcgatcagatgcaggttagtctgcataccggccatcgcgtaaatctggctacccagacgcgggatgaagaaggagttcattacggagttggaggtcactttgaactgaaccggagtgttcgccgggaaggcgatttcattcacggtagcaatgccctgctctggatagatgaagaaccatttccagtccatggagaccacttcaatggtaatcggtttttcatcgtgaaccagcggcttgcttggctcaagtgcgtgagtggttttccaggtcagtacggcaaggaacaggatgatcaggataggtaccgtccagaccacagcttccactttgttggagtgtgaccagttcgggctatacttcgcatctttattgctcgcacgatacttccaggcgaaaccaacagccatcaaaatggctggaataaccacaatcaacatcaggccaaaagccgtcaatatcagtgaacgttgttccagtccaatctgtcctttggggtctagtagtgcagaatcacagccactgagtaatacagtgcctgcgaataatgacaaccatcccaaacttttattgtatttcctgagtctcatttaacgacctcaattccacgggagtctggtggcgtttaaagtgtgcgggcattttacgggaaggttacattactgtaaacatcattaggcctgtgtcaggaaggtgttaccgggttctgccgcacgtgtcacaagtgttgcaaattatgtcggtttttatgaccgaagccgcatgagatgggctttataacgaaaggacccccaagcataccctaaaagggacaattggtataaccattgttaaaaataaacaaaaaattaacaattaattatcaataaaaagacatctaaaaaacgaaaaatcaaactatcgcatgctgaatcgtttaatgaaaaatagcgttttggaaccagagccaataatttccaaatcctatcccgcacaaaacaacaaatattttttttagtcgatggtggctatttcaccgttataatttcggttggtgattacaacgggaaataacctttcgcatttttcttcaggtcagctgcgttttacgcaacgccatgaaatcgagcagaccgcccgtcaggatcccaacgatggccagcagggctccggcgtccagcagaagggcctcaaacgggagcgccagtggtgtgctggcattaataatgagcacgataagccagagtgccagcgcaacgcagcccatcattaacagacgtaacgcaaaacggtaggcgcggtgatattccgttcgtggcataaagtgttcggtccgctgggtatattccagcgtctggcgacagaccagcaacaataaaatccccggcacggcagccacgacggagaaaagataaaacgttggccaaccgtgggcttccacaaaccagccggcgatcggacctacgtaaacgcggccaacggcagagagcgccgagagcagcgcgaactgcgtggcggaaaatgacttgttgcacagggtcatcagcagggcgacaaaggctgctgtccccataccgccgcagagattttcgaagaacaccgcagcggccatgctgatcatatgtttgtcggtaatcgacagcagccagtagcccgcgttagaggcgccctgaagaatgccgaagatcagcagtgcgcggaacagcgtcaggcgctgcatcagcacgccaccgtaaagtgccccgacaatggtcgcaaacagccccagcgttttattcactacccccacttcaccggcatcaaaaccgacaccgcggatcaggaaggtggtggtcaggctcatggcaaaggcgtcgccaagcttataaaggacgatcagcagcagaatcagccaggcgttgttgcggccaaagaagtcgcgcagcggttccgccacggcctgctccagcgagcggggaaccggaataacgtcgctcggttcgggggcaaagagcgtggcgataatgcaggggataagcagggcggccatcagccagtacatgccctgccagccgaggtaacggtcggccagccacagcgccagcccgccagagaccagcatcccgaggcgatagcccagcacgctgatggctgcaccggcaccgcgttcttccgcaggtaacacgtccgtcttccaggcgtcgaacacgatatcctgagaggcggaacagaaggcaatcaccaccgcaagcgcggccatccagcgcagctgcgtggtgggctcaagaaaccccatcgccgcgatggccagcagcagcaggacctgcgtcatcaccagccagccgcggcgacgcccgaggaacggcggcgtatagcgatccatcaccggcgaccacaggaacttgaagacataggcctgaccgacaagcgagaagaaaccaatggttttgagatcgatgttctcgaccgtcatccacgcctgaagcgtgccggaggtgagcgcgaggggtaaacccgaggcaaagccgaggatcagcagaatcgctgatttcggttgctggaaaatgcgtaagtaatggctggacatgttcttttaagactgacccggtgttacaccgggtcagtgagcaggattaacgtgcgttctgcttgataaagtcgtggatgctggtgtcctgcgccatatcggcgatggtatcggtcagcacgctgttaacggcgttagcaatgttctggttggatgcctggaacgcaccttcaacagagtagctcgcgcggtagtttttggtcatcttgttgccattcttcgcggtggcaatgatggcgatatccgctttggtggcgatgttgtagcgcacgttgccctgtgacacgtcagcgtacaggttgttaacgatgatctgcagatcaaccgcaccgcttgggccgatcatatagccgcgagcggtcatttgtttctccagcacttcctgcagcaggaagcgcaggtcacgggacgcggtgagcgtcacctgctggttatcgcgggtcacttttgctagcgcctgatcctgacgctgatcggcaccgttaatgctgacggtgacgcccatcaggcttgggtcctgctgaggcagggtgatttttggtgagacatcaatggtggtaggcggggtagcacagcctgccagcataaaaagggctaccaatggaaagaagagtttttttaacatttttaagttctcacgaatcgtaagcataatagagagaaaaattgccgccatcataacatcgccaacggtcaggggaagtggtcaacgcatgtaaattcatcgtcttgtctgaaaactgaccagctcactcattttctcctttcacggatgacaaaaggtatgagcctcacagttaacttcattcgtttgaatgagaaaatcgggcgaaagctaaatatttgttgtcaatgtgtaatggaaacggtaaaagcggctaatatttaaagggatgggtgacatcctggcgttgtcggaggagtaatttcatgatgatacgtgagcatatagaagataaattaagggcagcgttcaaccctgtgttcctcgaagtcgtcgacgaaagctatcgtcataacgtaccggcaggttctgaaagccactttaaagtggttctggttagcgatcgcttcacgggagaacgtttcctgaaccgacatcgcttgatctacagcaccttgacggaagagctctccacgaccgtgcatgcgctggcactgcatacctacaccattaaggaatgggaaggcttgcaggatacggttttcgcatcgccgccctgtcgcggtgcaggcactatcgcctgataaatcggatttgcaacggctggagcttttccagtatgttgcttacagatttcctcaaaacggccttcgggccgttttgttttgtctgagttttgagcggatggtgcgattttaaggctaaaaatagccttaaagtgtgaaaaaagccgcagcaacatgccccaaccgttctcgactcacctaagtgatgccgctataatgccgcgtcttattgaatgtcttcgggatgattctggcgacagggaatgtgaatctgcactaagagagcatcccggtataacagacagattcagagttgaccgagcactgtgatttttttgaggtaacaagatgcaagtttcagttgaaaccactcaaggccttggccgccgtgtaacgattactatcgctgctgacagcatcgaaactgctgtgaaaagcgagctggtcaacgtagcaaaaaaagtacgtattgacggcttccgtaagggcaaagtaccaatgaatgttgttgctcagcgttatggcgcttccgtgcgtcaggatgtgctgggtgaactgatgagccgcaactttatcgatgcgatcatcaaagaaaaaatcaatccggccggtgcgccaaactacgttccaggcgaatacaaactgggcgaagacttcacctactccgtagagtttgaagtgtatccggaagttgagctgaaaggtctggaatctatcgaagttgaaaaaccgattgtctccgtgactgacgaagacgttgacggcatgctggacaccctgcgtaagcagcaggcgaactggaaagagaaagaaggcgctgttgacgcggaagaccgcgtaaccatcgacttcaccggttctgtagacggcgaagagttcgaaggcggcaaagcgtctgacttcgtactggcaatgggacagggtcgtatgatcccaggcttcgaagatggtatcaaaggccacaaggctggcgaagagttcaccatcgacgtgaccttcccggaagagtaccacgctgaaaacctgaaaggtaaagcagcgaagttcgtcatcaacctgaagaaagtggaagagcgcgaactgccagaactgactgaagagttcatcaaacgtttcggcgtggaagacggttctgttgctggcctgcgtaccgaagtgcgtaaaaacatggagcgcgagctgaacggtgctgtgcgtaaccgcgtgaagtctcaggcgatcgaaggtctggtgaaagccaacgaaatcgacgttcctgctgcactgatcgacagcgaaatcgacgttctgcgccgtcaggctgcacagcgtttcggtggcaaccagcagcaagcgatggaactgccacgcgagctgttcgaagagcaggcaaaacgccgcgttgtggttggcctgctgctgggcgaagtgattcgtacccacgagctgaaagctgacgaagagcgtgtgaaaggcctgatcgaagagatggcttctgcatacgaagatccatcagaagtgatcgagttctacggtaagaacaaagagctgatggacaacatgcgcaacgttgccctggaagagcaggctgttgaagcggtactggcgaaagcgaaagtgaccgaaaaagcgacctctttcaacgaactgatgaaccagcaggcgtaatttcgccccaacggtttaaagtttgaacagaaaacccgttgccttgcggcagcgggttttttttatcgcagccagagcccaggaagagtgctaaaacgccctttcggtgttagcgtaacaacaaaaggttgttatgcttgaaatagggcactgtgaaccccataagtacgtaatcatgatgaatgagactggctgataatccgtccgtaaggttacaatcagtacagcaggtgttttcaattttgatccaggagacggaaatgtcatacagtggcgaacgagataactttgcaccccatatggctctggtgccaatggttattgaacagacctcacgtggtgagcgttcttttgatatctattcccgtctgctcaaggaacgcgttatctttctgaccggccaggtggaagaccacatggctaacctgatcgtggcgcagatgctgtttctggaagcggaaaacccggaaaaagacatttacctgtacattaattccccgggtggcgtgattaccgcagggatgtccatttatgacaccatgcaattcatcaaaccggatgtcagcacgatctgtatgggtcaggccgcatctatgggcgcgttcctgttaaccgcaggggcgaagggtaagcgtttctgcttaccgaattcccgcgtgatgattcaccagccgttgggcggttaccaggggcaggcaacggatatcgaaatccacgcccgcgaaattctgaaagtaaaagcgcgcatgaatgaacttatggcgcagcatacgggtcaacctctcgagcagatcgagcgcgataccgagcgcgatcgcttcctctctgcttcagaggcagttgagtacggcttagtcgactccgtgttgacccatcgtaattgatgcccgcgacgcgagtgtgccgctatactaaggtagggcggcacgctgcttgatgcagcttgcgtcttagaatggcatttgcgtcgtcatgtgcggcacaaagaacttaaaaagaggtttggactcatgacagataaacgcaaagatggttcgggcaaactgctgtactgctctttttgcggcaaaagccagcatgaagtgcgtaaactgattgccgggccgtccgtgtatatctgcgacgaatgcgtcgatttatgtaacgacatcattcgcgaagagattaaagaagtcgcaccgcaccgtgagcgcagcgcgctgccaacgccgcatgaaattcgtcatcaccttgacgactacgtcatcggccaggagcaggccaagaaagtgctggcggtagcggtctataaccactacaaacgcctgcgtaacggcgataccagcaatggcgtggaactgggtaaaagtaacattctgctgatcggcccaaccggttccggtaaaacgctgctggctgaaaccctggcgcgtctgcttgatgttccgttcaccatggcggatgccaccaccctgaccgaagccggttacgtgggtgaggacgtcgaaaacatcatccagaaactgctgcagaagtgcgattacgacgtacagaaagcccagcgcgggattgtttacatcgatgagatcgacaagatctcccgtaaatccgacaacccgtccatcacacgtgacgtatcgggtgaaggcgtacagcaggcactgctgaagctgatcgaaggtacggttgccgccgttccgccacagggtggtcgtaaacatccgcagcaggagttcctgcaggttgatacctccaagatcctgttcatctgtggcggtgcctttgctggtctggataaagttatctctcaccgtgtcgaaactggctccggcattggttttggcgcaacggtgaaatccacatccgaaaaaccgaacgaaggcgagctcctggcacaggttgaaccagaagatctgatcaaattcggtctgatccctgaattcatcggtcgtctgccggttgtggctacgctgaatgagctgagtgaagaggcgctgatccagatcctgaaagagccgaaaaatgcgctgaccaagcagtatcaggcgctgttcaatctggaaggggttgatctggaattccgcgacgaagcgctggatgcgattgccaaaaaagcaatgagccgcaaaaccggcgcgcgtggcctgcgttctatcgttgaagcggcactgctcgacaccatgtacgatctgccgtcgatggaagacgttgagaaagtggtgattgacgagtcggtcatcagcggtcaaaccaaaccgctgctgatttacggcaaaccggaagcccagcaggcatctggcgaataattcaccaaatcatacaagcagttaatcaaaaaggggggattttatctcccctttactttttccgtattcatagcgttgaatgtgtgggaaacatccccatatactggatacatgttaatggttatgtgaagcacagtgacatgaccagcttacctggcggacactaactaagagagagctctatgaatcctgagcgttctgaacgcattgaaatccccgtattgccgttgcgcgatgtggtggtttatccgcacatggtcatacccttatttgtagggcgggaaaaatctatccgttgcctcgaagccgctatggatcatgataaaaaaatcatgctggtggcgcagaaagaagcatcgacggatgagccgggtgtaaacgatcttttcaccgtcgggaccgtggcctctattttgcagatgctgaagctgcctgatggcaccgtgaaggtgctggtagaaggcctgcagcgtgcgcgtattaccactctgtcagacgacggcgaacacttctctgcgaaggcagagtaccttgattcgcctgaacttgatgagcgcgaacaggaagtgctggttcgcaccgcgattagccagtttgaaggctacatcaagctgaacaagaaaatcccaccagaagtgctgacatcgctgaacagcatcgacgatcctgcacgtctggcggacaccatcgctgcacacatgccgctgaagctggctgacaaacagtccgtgctggaaatgtccgacgttaacgaacgtctggaatacctgatggcgatgatggagtccgaaatcgatctgctgcaggttgagaagcgtattcgcaaccgcgtcaaaaagcagatggagaaatctcagcgtgagtactatctgaatgagcaaatgaaggctattcagaaagagctgggcgagatggacgacgcgccggacgaaaacgaagcgctgaagcgtaagatcgacgcggcgaagatgccgaaagaggcgaaagagaaagccgaagcagaactgcagaagctgaaaatgatgtctccgatgtcggctgaagcgaccgtcgtacgcggctacattgagtggatggtgcaggttccgtggaacgcccgcagcaaggtcaaaaaagacctgcgtcaggcgcaggagatcctggatactgaccattatggcctggaacgcgtgaaagaccgcattcttgagtacctcgcggtacagagccgtgtaaacaaaattaaaggcccgattctgtgcctggtaggaccgccgggggtgggtaaaacctctctgggccagtccatcgctaaagcgaccggacgtaagtatatccgtatggcgctgggcggcgtacgcgatgaagcggaaatccgcggtcaccgccgtacctacatcggttctatgccgggtaaactgatccagaagatggcgaaagtgggcgttaaaaacccgctgttcctgctcgatgagatcgacaaaatgtcgtcggacatgcgtggtgaccctgcgtctgcgctgctggaagtacttgatccagaacagaacgtggcgttcagcgatcactacctggaagtggactacgacctgagcgacgtgatgttcgtggcgacgtcgaactccatgaatattccagcgccgctgctggaccgtatggaagtgatccgtctctccggctataccgaagacgagaagctgaacatcgcgaaacagcacctgctgccgaaacagattgagcgtaacgcgctgaaagccaacgagctgaccgtcgaggacagcgcgattattggcatcatccgctactatacccgtgaagcgggcgtgcgtagccttgagcgtgaaatctctaaactgtgccgtaaggcggtgaaacagctgctgttggataagagcctgaaacacatcacgattaatggtgataacctgcatgcctatctcggcgttcagcgtttcgactacggtcgtgcggacaacgaaaaccgcgttggccaggtgaccggtctggcatggacggaagtgggcggcgatctgctgaccatcgaaaccgcctgtgtcccgggcaaaggcaagctgacctacaccggttcactgggtgaagtgatgcaggagtccatccaggcggcgctgaccgtggtgcgcgcgcgcgcggaaaaactgggtatcaacccggatttctacgaaaaacgcgacattcacgttcacgttccggaaggggcgacgccgaaagatggcccaagcgcgggtattgccatgtgtacggcgctggtttcctgcctgacagggaacccggttcgtgctgatgtggccatgaccggtgaaattacgctgcgtggtcaggtactgcctatcggcgggttaaaagaaaaactgctggcggcacaccgcggtgggatcaaaaccgtattgatcccttacgaaaataaacgcgatctggaagagattccggacaacgttattgccgacctgcagatccatcctgttaagcgaattgaggaagtacttagtctcgcattgcagaatgaaccgtccggaatgcaggttgtaaccgcaaaatagtgacctcgcgcaaagagcgtcaataaaaacaaggctggtaagtcatttcgcacttgccagcctttttttgtatagctaatttagattgctgattaggtcagccatcaacaacgggtgttgtaaggtcatggcaggcctgatataactgctgcgcggtcgcgttgtgaaggattcaggcgcgatataaattataaagagaggaagagaacagtgaataaatctcaactgattgacaaaattgctgctggtgctgatatttctaaagctgcagctggacgtgcgttagatgcattaattgcttctgttactgaatctctgcaggctggggacgacgttgcactggtaggcttcggtacttttgctgttaaagagcgtgctgcccgtactggccgcaaccctcagaccggtaaagagatcaccattgctgccgctaaagtgccgggtttccgtgcaggtaaagcgctgaaagacgcagtaaactgattgctttcccgtttcagggaagccggatagtacaagggcgcatcttttgatgtgccttttttgtttgtccagacctgatttgtgcgagtttatgcgagttgtgggctgacaatcgccccgttttcttgtcacaatacgactttacgcgcgacgggcaggattttccgtcagcgtcaggtaaccagtcacctacagcggagtgttgttacaccatgatggacagcttacgcacggctgctaacagtctcgtgctcaagattattttcggtatcattatcgtgtcgttcatattgaccggcgtgagcagttaccttattggcggtggcgcgaactatgccgcaaaagtgaatggccaggagatcagccgcggccagttcgagaatgcttttgccggtgaacgtaaccgtatgcagcaacagctgggcgaccaattctctgaactggcagcaaacgaagggtatatgaagaccctgcgtcagcagacgctgaaccgtcttatcgacgaagcgctgctggatcagtatgccaaaaaactcggccttggcattagcgatgagcaggtgaaaaaagccatcttctccacgcaagccttccagtctaacggtaaattcgacaacgcgcgttacaacagcatcgtcaaccagatggggatgacggccgatcagtacgcgcaggcgctgcgtaaccaactgaccacccagcagctcatcaatgcagttgttggcaccgatttcatgctcaaaggcgaaacggatgaactggctgcgctggtggcgcagcagcgcgttgtacgtgaagcgaccattgatgttaacgccctggcggcgaaacagcaggtgagcgacgctgatattaacgcctggtacgagcagaacaagaatacctttgtttctccagaacagttccgcgtgagctacatcaagctggatgcggctgcgctgcaggaaagcgcgtctgacgcggaaatccagtcttactacgaccagcatcaggatcagttcacacagccgcagcgtaaccgctacagcgtgattcagaccaaaaccgaggcggatgccaaagcggtactggatgagctgaacaaaggcgctgattttgcgaccgtcgcgaaagcgaaatccaccgacattatctctgcgaaaaacggcggcgatatgggctggctggaagacgcgaccacgccggacgagctgaaaaatgccggtctgaaagagaaaggccaactgtctggcgtcattaaatcatccgtaggtttcctggtcgtgcgtctggacgacatcaccgcggcgaaaaccaagccgctggctgaggttcgtgacgatatcgcggcaaaagtgaagcaggaaaaagcgctggatgcctactatgcgctgcagcagaaagtgagtgatgctgccagcaacgacaacgaatctctggcgggtgccgagcaggcggctggggtgaaagcggttgagacgggctggtttggtcgtgacaacctgccggaagagctgaacttcaaaccggtttctgatgccatcttcaacggtggtctggttggtgagaacggcacgccgggcagtaactcagacatcattaccgtcgatggcgatcgtgcgtttgtgctgcgcgtcagcgagcacaagccagaagcggtcaaaccgctggcggaagtgaaggatcaggtcgtcgctcaggttaagcacaacaaagcggaacagcaggcgaaactggatgctgagaagattctggccgatctgaaagcgggtaaacaggacgcgctgaaagcggctggcctgagcttcggtgaagcgaaaacgctgagccgtaccggtcaggaccctatcagccaggccgcgtttggcctgactctgccggcgaaagacaagccaagcttcggcaccactaccgatatgcagggtaacgtcgttctgctggcgctggatgaagtgaaagccggcactctgccagacgcgcagaagaaggcgatggtccaggggattacccagaacaatgcccagattgccttcgaagccatgatgagcaacttgcgtaaagaggccaaaattaagctgggcgatatcattactcagcagcaataattacgtatctgctcgcagattttcgcaacgctctgcaataattaaaggccgctttcgcggccttttccatttctgcactctgctgtttgtgcctcttttatcgggcggctatcgtgacgtggctgtctacaaacaaggagataacagcatgaaatgtggaatcaaagcactgtttattacgctggctattgccaccaccgggctgaacgcgggcgcactggcggcgacacctgccgctaaaccacaggcggtacagagtaaaaacgacaccgcagcgccggggcaggggcaaaccaaagcggctgacgttggtaaaaacgtggatgatgacggtacgcgagtcagcatcaatgcggcctctgcggaagagctggcccgcgtgatgaatggcgtcgggctgaaaaaagcgcaggccatcgtaagctatcgtgaagagtatggtcctttcaaaacggtcgacgatctcaagcaggttccgggcatggggagcgcgctggttgagcgcaacctcgcacacctgacgttgtaatctcacaattacttgcacagcggcaaaattttgccaggataaagaggtcataccagttatgacctctcatcctacaataacagtaaaggctattgcgctatgcagacaaaaataaaagtacgcggttttcacctcgacgtttaccaacatgtgaacaatgcccgctacctggagtttcttgaggaagcgcgctgggacgggctggaaaacagcgaaagctttcagtggatgaccgcgcacaacatcgcgttcgtggtcgtcaatatcaatatcaactaccgtcgccctgccgtgttgggcgatgtgctcacggtgaccagccaggtgcagcagatcaatggcaaaagcggcgtgttaagccaggtggttacgctcgatcccgaagggcaggtggtggctgatgcgttgatcacctttgtctgtatcgatctgaaaacgcagaaagcgctgccgctggaaggggaattgcgcgaaaagctggaactgatgatcgtgtaacccaggttcaggcttacccgtgctgtcgacacctgctatgtgacagcacggtcaggtcgccctatttaagcccggtttttttctgcattgcggccatcacgccggctttatcggcaagatagtggttcagcccgttagcgcgcagattacaggcggcgcactggccgcaaccgtcgcctttaatgccgttgtagcaggtgagggtttcgctgcgaaccaggtccagcttgccccagtagtcggccagcgcccaggtttcggctttatccagccacatcagcggggtttcaaagcgcgtctctttcgccatccccagattgacggcgtgatttaacgccttcacgaactcatcacgacagtccgggtagccggagaagtctgtttcacacacgcccgtgatcaccgcttcggcttttacctggtaggcataaattgccgtcagggtgaggaacagaatattgcggcccggcacgaaggtattcggaatgccgctggcatcgggttcgtagtccgggacgggaatactgtcccgggtgaggctactcacggccagttcatttaacagcgtaacgtccagcaccttatgcgcgcgtgcccccagtttcagagccagttcacgggcaacgtcgatctcagcgcgatgtcgctgaccataatcgaaagtgacacagtgaacctcatcgtactgatgaagagcctggaccaggcaggtagtagagtcttgtcctccgctgaacacgacgacggcacgtttcataaatcatctcgactgttacggtaaaacgttatgttaccgtctgcctgtggcggcgaccagcttcttcacgatttgggggcgggcagccaggcttcggtaaaatcaaaccagccgcgggtgttgaggcgaatcccattcacgcccggcggcgcgctgatctgatactgataattaaagagcggcgtcagcaccgcattttccattaatcggctaaaaatggccttcaggcccgcgtgccgatcccgagcctcggcctgagtctgtaccgcatccagcgtggcttgcaaatgggcgtacgccggtgcgcttaacacgtgtggccaaagcgtatcgcagcgcagccactgctcaagcgtatacgctggcgcttcgccaatcagcctgtcgcccatcatgatgtctgcttcggcaagctgctggcatccgtcccacgtcttggcgtcatgaaagatgacggtcagctcacaaccctgtagcgccaggtacgtcttcaactggctggccatggtgtgaagctcaacgggaagatggtaaaccagcgtcagtgcttcaggcagggcaacatcggttaaatcagtccagtcggggattgtccagccgggaagcagttccccggtgggggtgatgagcccttcgtttagcggaagcgtgtggagaagcctggagtgatgaatgatattaatcagccgctttgcctggttctcactcaggcgtgcgctctgttttagcgtgaggtaacagaaccccaggctggtgctgctgcttaccagccgcagactttccagctcgtcggcctcaccaatcgcgatttgcaccgggtgacggcagctggtacccaacctgtgatcaaaaagctggggtgtgatccagtattcgatggctttgagcagcggatggctcaggtggtactgctcatggctttccagacgaaccaggtcgggttcaaaggcgaccagccgaaaggggccgctgccaatcgtcgaatggtcgggatgcgccagacggctacagtaggttgccagcctgtgcggcagccagtagtccggatgatgcagcgtaaacgtcaggcactgcggatgcgttgtttcgatacagaggacgctctgaaacagggtgcgcagggcgggaagcgtcaacagcgcggtcaggctccgctggagatgcgccgtttcaattttatcgccgttatgccagtgcagcgtggagcgaatgtagaaatgccagcgcaggccatcatccgacacatcccagtgatgcgccagatcgcccgtaggttcactgctgttgccgtgaaatcgcgtcaaacctgagaagacttgccctgccagatgctgctctgcccgacccggtaaaaagcccggctgaagcggctccagtgagcggtagtagggaatgcgcagcgtcggcgtgtcgttttgccactgcccacccaaaaacgggtgcagcagggcacgcaaatcttcgggagcaagctgcgccagctcgagggcgttatgctgctgcccgctttttagcgcttcttccatcatcgtgttgcgcagtgattccggagtgacgtgaaacgtcagcgcaccgcgccttccacgcccggactgcgcgcgccaggtcagccagcccgcctcctgggcctgacgcagcagagtacggacatgtcgctcgctacaaaagcagcggctggcaagttcatttacggttacctgctgcggcgcgccagcggaaggttgccacaggcgttgatactggttaagacggttaagctggcgcataagaaacccggaacaataattttcatctattcactattacttccgtatatctcacacgatactgatgcacaagttaaccgcatcacatttcgggagtaatcatggctcggctcgctgcatttgatatggacggtacgctgttaatgccggatcaccgattaggggagaaaaccctgaacacgctgaagcgcctgcacgagcgtaatgtcaccctgacgtttgccaccgggcgtcatgttctggaaatgcgccatttgctgggcgcgtttgccctcgatgcctttctgatcaccggtaacgggacgcgaattcactctgtagaaggcgatgtgctgtaccgacaggatctcaacccggaagtggcggatatcgtgctgcacagtacctgggacacgcacgccagcatccacgtctttaacgatcggggctggtttaccggaagcgacatcccggaattattgcacgcacatgtgtatagcggttttaaataccagcttatcgatctgcgtcggatccccgcccatgcggtgaccaagatctgcttctgcggcgatcacgacgatctctgtcgcttacggatccaactgaatgaggcgctgggcgaccgggcgcacctgaccttctcggcggtggattgcctggaagtgctgccggtgggctgcaacaaaggttccgctctggcggtgctgagcgaccacctgggattaacgctgcaggagtgtatggcgttcggtgacgccatgaacgaccgcgaaatgctgggtagcgtaggtcgcggtctgatcatggggaatgcgatggcgcagctgaaagcagaacttccccatctgccggttatcggtcactgccgtaatgaagcagtgtcccattttttgacgcattggctggacaataacaacctcccatattcccccgaatagtgagacccttccagcaagccagacttcggtctggctttttttatttcagcagttgagcaatctgcgccttccagggggcgatatcaccgatgttggcctgcacccactccgcattgtagtaggtctcgagataacgctcgccgctgtcgcacagcagcgtgacgatggaaccggtgcgtcccgcttcgcgcatacgtgcggcaagctgcagcgcgccccacatattggtgcccgtcgaggcgcccactttgcggcccagctgcgtttccagccagtgcgccgttgccacgctggcggcatccggcacgcgcatcatctcgtccacaacgtcggggatgaaagagggctcaacgcgcggacggccaatcccttcaatcttactccccaccgggctgcgcagaccggcatcgcggttttgccagtagtcgaggaacacggagttctgcgggtcaactaccatcagttgggtatcgtaaccctgacagcggatatagcgtccgatcgtggctgacgtaccgccggtaccggcgctcatcacaatgtaggacggaaccggatgcggttcgtgggtcatctggcggaagatactgtcggcaatgttgttattcccgcgccagtccgtcgcgcgctcggcgaaggtgaactggtccatatagtggccgttcagctcacgggccagcatttcggaggcggcgtagatttcgcaggcgctttccacaaagtggcagcgaccgccgtaaaattcgatctgttcgattttgcgttttgcggtgcaggagggcatcaccgcaataaacggcaggcccagcaggcgggcgaaataggcttcggacaccgccgttgaaccggaagaggattcaatgatggtggtgccttctttaatccagccattacataaaccgtataaaaacagcgagcgcgccaggcgatgcttcaggctgccggtaggatgggtgctttcatctttcagatagagctgaatgccgtcaaatcccggcagggaaaggcgaatcaggtgcgtatccgccgagcgctgatagtcggcattgatttcgctgatcgcatgtttaacccaggtgctattcatcgtcgttatccgtttgtcattttgtgcctagcatagcgaaaagcacagaaaaaattgttgctatctggcctttaaaatagaattaagggagaaaaattttctctgtgaggtgggtatgctagataaaattgaccgcaagctcctttcattgctgcaaagtgactgtaccctctctttgcaggcgctggcagatgccgttaatctgaccaccaccccgtgctggaagcggctgaagaagctggaagatgacggtattcttctggggcgcgtcgcgctgttagatcctgaaaaactggggcttgggttgacggcatttgtgctgataaaaacccagcatcacagcagcgagtggtattgccgcttcgttacccaggtgtctgagatgcccgaagtgctcggtttctggcgtatggccggcgagtacgattacctgatgcgcgtccaggtggccgacatgaagcgttatgatgacttctacaagcggctggtgaacagcgtgccggggttatcggacgtcacctcaagcttcgctatggaacagattaaatacaccacagcattacccattgaataacttcgtaaaataccttcaggaacaaaccgcgtgcgattatttgcccaattaagctggtactttcgtcgggagtggcaacgctacctcggtgcagtcgccctgcttattatcattgctatcctgcagctgatcccgccgaaagtggtgggctacgtcgtggatggcgtcaccgaacagcattacaccaccgcacgggtgttgatgtgggttggcacgctggtgctgacggcggtcattgtttatctgctgcgctacgtctggcgcgtgctgctgtttggtgcgtcctatcagctggccgttgagctgcgtgaagatttttatcgccagctgagtcgacagcatcccgaattttatctgcgccatcgcaccggggatcttatcgcgcgcgcgactaacgacgtcgatcgcgtggtctttgccgccggggaaggggtgctgacgctggtggactcgctggtaatgggctgcgcggtgctgatcgtcatgtcaacgcagatcagctggcagctgaccctgttggcgctgctgccgatgccgctcatggcgctggcgatcaatcgctatggcgaacaactgcacgagcgctttaagctggcgcaggcggcgttttcgtcgctgaacgatcgcacccaggagagcatgaccagcatccgcatgatcaaagcgtttggtctggaagaccggcagtccgcgctgtttgccgccgatgcggccgacacgggggcgaaaaacatgcgcgtcgcgcgtattgacgcgcgatttgatccaacgatttatatcgcaatcggcatggcaaatatgctggcgattggcggcgggagctggatggtggtgcagggcacgctcaccctgggccagttgaccagctttgccatgtatctggggctgatgatctggccgatgctggcgctggcctggatgtttaacatcgtggagcgcggcagcgccgcctacagccgtattcgcgccatgctggccgaagcgccggtggtcaatgacggcagcgaagcgttgccggaaggacgcggcgtcatgcatgtcgacgtccgcaagtttatctatccgcaagcggaacatccggtactggagaacgtcagttttacccttcagccgggccagatgctcggcatctgcggcccgacgggctccggtaaaagtaccgtactctcgctgctccagcgtcactttgacgtcaccgagggcgatattcgtttccatgatattccgctgaccaggctgctgctggatgagtggcgtggtcgcctggcggtcgtcagccagacgccgtttcttttttctgacaccgtggcgaacaacatcgcgcttgggtgccctgcggcaacgcaggaagagatcgagcatgtggcacgtttggccagcgtgcatgatgacattttgcgcctgccgcagggctacgaaacggaagtcggggaacgcggcgtcatgctgtccggcgggcaaaaacagcgtatctctattgcccgcgccctgctgctcaatgcggaaatcctgattctggacgatgcgctctccgccgtggacggccgtaccgagcatcagatcctgcataacctgcgccagtggggcgacggacgcacgataattatcagtgcccaccgtttgtcagcgctcaccgaagccagcgaaattctggtcttgcagcacggccatattgcccagcgcgggcagcatgacgcgctggcagagcaaccgggctggtatcgcgatatgtaccgctatcagcagcttgaggcggcgctggacgatgcgccggagcaggatgaggaggccgccaatgcgtaagctcggaacgatgtggccgacgctcaaacgtctgctggcctacggctcgccgtggcgcaaaccgctctccgtggccgtgcttttactctggatagcggcgattgctgaggtgagcgggccgctgctcatcagctacttcatcgacaatatggtcgccaaaagctacctgccgctcgggctggtggcgggattaggcgtggcctacgttgggttgcagctggcggcggcagggctgcactatgcgcagtcgctgctgtttaaccgtgcagccgtgggcgtggttcagcagttgcgtaccgatgtgatggacgcggcgcttcgccagccgctcagcgaatttgatacccagccggtcgggcaggtgatttcgcgcgtgaccaacgataccgaggtgatccgcgatctgtacgtcaccgtggtggcaaccgtgctgcgcagcgcggcgctgattggcgcgatgctggtggcgatgttcagcctcgactggcgcatggcgctggtggcgataacgatcttcccggcggtgctgatcgtcatggtgatttaccagcgttacagcacgccaattgtgcgccgggtgcgcgcctatctggccgatatcaacgatggcttcaacgaagtgatcaacggcatgagcgtcatccagcagttccgccagcaggcgcgctttggcgagcgcatgggcgaagccagccgttcgcactatatggcgcgtatgcagacgctgcgcctggacggtttcctgctgcgaccgctgctgagcctgttctcggcgctggtgctgtgcgggctgctgatgctctttggcctgagcgcaaacggtacgattgaagtgggtgtgctgtacgctttcattagctatctgggacgccttaacgagccgctgatcgaactcactacgcagcaatcgatgctgcaacaggcggttgtcgccggtgagcgcgtctttgagctgatggacaggccgcgccaggcctacggcaatgacgagcgacctctgcaaagcggggctatcgcctttgataaggtctcgtttgcctatcgcgaagaccgtctggtgctgcaggacattacgctcgatgtgccgtcacgcggtttcgtcgcgctggtgggccacaccggcagcggtaaaagcacgctcgccagcctgctgatgggctactatccggtcacgcaaggcgaaatccgcctcgacggacgcccgctcgcgtcgctcagccacacggtgttacgcaaaggcgttgcgatggtgcagcaggatccggtcgtgctggccgataccttctacgccaacgtaaccctgggacgggactattcagaagcgcaggtttgggcggtactggaaacggtgcagctggcagagctggcgcgcgggttcagcgacgggatcaacacgaagctgggcgagcagggcaacaatctctccgtggggcaaaaacagctcctggcgctggcgcgcgtcctgattgaaacgccgcaggtgctgattctggacgaagccacggccagcatagattctggaaccgagcaggcgattcagcaggcgctggccgccgtacgcgaccacacgacgctggtggtgattgctcaccggctctccaccatcgtcgacgcggacacgattctggtgctgcatcgcggacaggccgtggagcgcggtacgcaccgcgagctgctggaagcacaagggcgctactggcagatgtaccagctgcagctggcgggcgaagagctggccgccagcgtgcgtgatgaagagtcccttagcgcctgatgcactaaaatgaggcgccgcgctaacagtcattcctgttggtgcaaaactgaaacgcaccctgcaccggcatggtgcgttttttttcaccggtttatttatcagaaccgtgtaacgcacatcgcgccgcgattccctcacgttttcatttctggcacatcccttgcaataccttccgcgtaagctgcggccattaccgaattctgactggaggggatctatgaagctggttacggttgtaatcaaaccattcaaactcgaagacgtgcgtgaagcattgtcttcaatgggtattcagggactgactgtcaccgaagtgaaaggctttggtcgtcagaagggtcatgccgagctttatcgcggggcggaatacagcgttaactttctgccaaaagtaaaaattgatgtcgcgattgctgacgatcagcttgatgaagtcattgatgtcattagcaaagcggcctacaccggcaaaattggcgacggcaaaattttcgttgccgaactgcagcgcgtcattcgcatccgtaccggcgaatctgacgaagcggcactgtaattaacgcctggcacacagtgatagggatcgagaaaatgaagatagcaacacttaaaacgggtctgggttcgctggcgctgctgccgggcctggcgttggctgctgcccctgcggtggctgacaaagccgataacgcctttatgatgatcagcaccgcgctggtgctgttcatgtccattccgggcattgcgctgttctacggcggtctgatccgtggcaaaaacgttctctccatgctgacgcaggttgccgtgacgtttgcactggtctgcgtgctttgggtggtttacggttactctctggcgttcggcacgggtaacgcgttctttggtaacttcgactgggtgatgctgaaaaacattgaactgaccgcgctgatgggcagcttctatcagtatattcacgtggcgttccagggctcgttcgcctgcattaccgtcgggctgattgtgggcgcgctcgccgagcgcattcgtttctctgcggtcctgatcttcgtggtggtctggctgacgctctcctatgtgccgattgcgcacatggtctggggcggtggtctgctggccacgcacggcgcgctggacttcgcgggcggtaccgttgtccacattaacgccgcggtcgcgggtctggtgggcgcttatctgattggcaaacgcgtgggcttcggtaaagaggcgttcaaaccgcacaacctgccgatggtctttaccggtactgcgatcctctactttggctggtttggcttcaacgccggctcagcaagtgcggccaacgaaatcgccgcgctggccttcgtgaacaccgttgtggccacggcgggtgcaatcctctcctgggtgtttggcgagtgggcggtgcgcggtaaaccttccctgctgggtgcctgttcaggtgcgattgccggtctggttggtatcacccctgcgtgtggttatgtcggtgtcggcggtgcgctgctggtcggcctggtgtccggtctggcgggtctgtggggcgtcaccgcactgaaacgcgtgctgcgcgtggatgacccttgcgatgtgttcggcgtgcacggcgtgtgcgggattgtcggctgtatcatgaccggtatcttcgcggcgaaatcgctcggtggcgtgggctacgcagaaggcgtcaccatggttcatcaggtgctggtgcagctggaaagtatcgctatcaccgtggtgtggtctgcagtcgtcgctttcatcggctacaagctggcggacatgacggtgggtctgcgcgtaccggaagagcaggagcgcgaaggtctggatgtgaacagccacggcgagaatgcgtataacgcatgatctgagtgtcttgccgggtggcggcttcgccttacccggcctacaacagcacaaaacgtaggcccggttagcgtcgcgccaccgggctttttacatcaacctctgttacgcatcaccccttcctgcaccgttgaagcgaccagcacgccgtcctgagtataaaactccccacgcacaaacccgcggacgctggatgccgacgtactctccacgctgtagagcagccactcgttcatgttgaagggacggtggaaccacatcgagtgatcgatcgtcgcgacctgcatccctttttcgaggaagccgacgccgtgcggctgcagcgccaccggcaggaaattgaagtcagacgcatagcccagcagatactgatggacgcggaaatcttccggcacgctgccgttggcgcggatccacacctgacgctttggctcggcggtgtggcccttcatcgggttgtggaactcgacggggcggatctcaagcggcttatcgcagagaaacttctctttaacctgcggcggcagcagatgcgccaatgcgcgagcgatatccgtttccgatttaagatcgtccggcgagggggcagggggcatgaccttctgatgctcgtagcccggctctggcgcctggaaagaggcggtcatgtaaaagatcggcttaccgttctggatggccgcgacgcggcgcgcgctgaagctgttgccgtctcgcagaacttcaacgtcatacacgatgggtttcgcgctatcgccagggcgtaaaaagtagctgtggaatgaatgcaccagacggtctgccgggacagtctcctttgcagcgtacagcgcttgtccaacgacttgcccaccgaagacctggcgtaagcctaaatcttcgctctgtccgcgaaagagtccttcctcaattttttccagattcagtaatgtcagcagattgttcagtgcctgactcatagttgtcctcaataaacgccgtagcgaaagataggcagagtataacgcagaaatgaaagtggtccgatgggtagaataatctgaatatcgggatgatttcaggcattaatcagtgagttgtgccacacttaaaaacgttatgtgattgaaacgacatcggatgggatcgatcccgctggtgcattgatgataaggagacttcaatgaaactcgtgcctatgctaagtggtgtagcgattgcggtggcgttgtccgcctgtgccggtaagagcgcccaggtgccagtgccagcagctgacccgaacgggattaataccctttcgcagcagtccattcagcagcctaacgtttccggtaccatctggattaaacagaaagttgcgttgccgccggatgcggtattaacggtgacgctgtctgatgcttccctggccgacgcgccgtcgaaagtcgtggcccagcgtgccgtccgtactgaaggcaagcaggcgccgtttagcttcgtgttgccgtataacccgtcggacgtgcagcctaatgcccgtatcctgctgagcgcagcggtcaccatcaacggtaagctggtgtttatcaccgatacggtccaggaagcgattaacaacggtggaaccaaaatcgacctgaacctggtgccagtacagcagaccgaagtgccggtcgcaccgcaaaccaatcagccgtctctgccaaccccaccgacgcagatgtaatgtggttattcccctctccttcgggagaggggtcagtacacccaccggtacttctgtaaatcgatctgacccgaccctgacacctgcaccccttctgaaagtaacgcctgacgctgacgctggagatccggcccggtgagtgagatggcgccatgacggttcaccactcgatgccagggcaacgtactgccttccggcagccgtttcaggacgcctccaacctgtcgcgccgcgcgcggggaaccggccaggcgcgcgacatcaccataggtggtgacatagccttccgggattgaagccacgatttgccatacgcgctgtggaaaagagtcctgctcgtccataccttcacctgcggggagtttctggagagccatggtaaacgaagatcgccctgattgctgcgcctgtttgcgcaagaaaccagcatccggttcctggcggcttgcaattgggccttcgcacagggataatgcgcgagcgcgttggttatcaacgctctcaatgggggctctgttggttctcccgcaacgctactctgttcaccaggtcaggtccggaaggaagcagccagggcagacgacgtgtgtgccgggatgtagcggcaattgcatacaataaccacggatcgacatgataataatgtccggcgttatcccaacagttcgcgaatacgctttgactaaacagcagtaaaaatataatcacgcgtttcatgagcacctgctttttaaatactgaacctctttccgctcatcattagcgataattctgaagtgttggtcacacccgaagtggggtgtgaccaactattgcgggttgatatcattcccgcaatccacggttcagaaggttatttgcagtctgttgaaggaccttctttcacccatacatcgctgttagccgggttgtcaccgcgggtccaccatttggcacggtaaatgttaccctggtaggttgtggtttcgccgccgttataaaccaggtcagaacgccagttcatcttcacgttgctgaccagctcccaggcatccacaccgaagccaggctggttgccttgcgtccagtacttcgctttccacaccagatggtcgaagctcacggtatcgccactgttgtagattttgctggcatcccacgcggcatatttgctggcgttagcatcgacaggcgcatcgcagctaccggttgcagacccttcgtcagatggcggggtcacgtcatcagacggaggcgtaacctcatcagagggtggcgttacgtcatcagacggaggtgtaacctcatcagacggcggtgtaacgtcagccggtttcggattcacggtaacctgcacgttagactgcacgctggttttgccgtcgcctacaactacgctcagcgtataggtagacgtggtggcaacgtctggtgcagtaatcgtcacgttcgcggtatcggtaccggttgcatgcatatccgctggcacgctccaggagaaggtcatcgcatcaccgtctggatccacagcctgcgcgtgcagagcataggtttctcctgcctgcagcgtcactgcctccattgcgttcacgactggcgcctggttagcttttggcgctttgttcacaacctgcacatcaatggcgttgctcaggcctttagcatccgtaaccgtcaggcggaacaccatggtctggtcgctggtcgctgccgcaacgttgaaggttgctttcgctttggtgctgttggagagagttacagatgggccagaaacctgggtccatttgtaggtaatcgcatcgccgtctggatcgctggaagcagaaccatcaagcgtgacggttgccgggccagagacgttctgatccgcagaagacgcgattggcgcatggttggtgacgaccggatcgaccggggtagaaccgcccagcagactttcgttcatcgcgttcaggatgtcgccggtatcagagtcaatagaccaggcaaagagcccgcccaggtttttcgacagcacatacttgcctttagcggcggtagagcgtgcatcttcataggtgatcaggtcgccggtagacttattgaagacatatggcgcttcagcattcgcgtcgtaaccatattcccagccaggcttgcctttgtactcgttaacgatctgacggtagtagaccacgccaggttcccaggtacctttcaccataccggttgcggtacccgtgaatggattgtcaccggtgtagccatgcacgccagtccagccgcggccatacatgcccgcacccaccacgatcttgcctggctgtacgccctgagcaagcagcgcgtccacgccgttctcggtggtgtagtttgtgtccggacgccatgacggcgcgcgcagtgcggcctggtggcccagctcggtgttgctccagccgccgtagaagtcatagctcatcaggaagatgtggtcgaggtactgctgagcagcggtgtaatccacgtcttcaatcttatcgcggcccgcaccgatggcgctggtcagttcataggtacggccagtctgtgcagacagctcgttcagcatggtgcgcaggtcatgcatcagggcggtatacgtcgctttatcctgctgcgggttacccaggtgttcgctcacgccgccgccgccagggaattcccagtcgatatccacaccatcaaagaacttccaggtctgcaggaaatctttcacagaggagacgaagcgggcacggattgccgggtcgcctatgtggaagaacggatcggacagcgtccagccaccgatggatggcagcactttcaggtccggatgcgcttttttcagcgccatcagctggccaaagttacctttgtacgggtcgtcccagttggagacgccagactgcggtttttgcagcgcagcccacggatcgtgaatggcgacggtatagtccggacgacccgcgcagtcgcgctgcagtacggagaagctgttaccgccttcaacggttttcaggccatcgttgatgccgtcgccgccacagattggaatgaagccatagaggatgtggttaaggttcgctgccgggattttatcaaccgggaagttacgatcgtaaacgccccattcagggaaatacgccgcaaccactttatcagtatgtttggcgaacgttttgttgttctcctgcagcggcgcgttcagcggcagcagatggctgccgtcggtgtccgccacgatgatcagcttgctggcgcttttggtacagccgctggcattacagacttccacctgctcctgataacgtccgccctttttcactttaaaggtggctgagccgcttgcaccagctgcgccggtccacacggttttaccatccagcagcacttttgcagacgttggcgcgtcgccgctccacacgttccactcgactttcacatccacgccgtcgttatgtaccttgacgaggctgttgtaatcctgcgcggcctgatccacctcgaccagcgcaaatttgtcattgccggagccgatggtcggcgcacctggcgcagcagcgaatgcagaaccggttgccgctgcaataaagagcgccagatatttaggcttaataaatttcatttttctttcctgataaatttattcgtaaacgaaattgatccatgtcttcctttagaacatggaatgatattcacatagtgcgtttttaaatacgcagacagccgttatccaaaccttaaagacgcgttgtattcctccattaaaagatacaagctaaaaatccgtgtagcttatgccttttacgatacactgaggataaaaggtcgtccttctctttcctcgtcgaaaatattgataaaaaaacttgacccggttatttaataggtattcaaaaatagctggcaggtatagagcgctattccagcaaaagccagataaggtccgaaagcgatggtttggttatttttattcgatttatttaatagcaaataacccactatgccacttaatgcggcaattaattcaatcgcagggagtgactgccagccgaaccaggcgcccagcgccgccagcagcttgaaatcgccgtagcccagcccttcccgacgggtaagcagacgaaacgcccagtacaccagccagagcgaaagatagcctgccaccgcgcccagcagcgcatcacgcaggggcagcccgtggctgaaggcgtggaacagcagcccggcccagagcagcggctgcgtcaggcagtcgggcagcagctggtgctgtccgtcaatcatcgccagcggcagcagaaacgccgccagcacccacagcgagaaaagggatgctaagtccggtatccaccgggcggtgaggccaaagaacaacgccgtcaacagctcgagtaaaaataaccgcagcggaatcggcgacttgcagcaacgacagcgtccccgcagcgccagccagctcagcagcgggatgttctcccatgcgcgcagagcatgctggcagacgggacagtgtgacgccgggaaaagcaggttgctgcggctctcctcctctagcaccatccccggcacgcgatccaccacaacgccgagaaaactccccaggatcgcgccgaatacgccgctcatcgcggcaaacccgacgggataactctcccggacgagtatcagcccgttcatgccacttttttccaggtcagctggatttcggccttcacgtcgctcaggtgatccacgggcgtgaggttcattttctccagcctgacgcctgacgcgaggttcatctcccgcagccagttttttaattcatacacgttgacccggttcacgacaaaggccagagtctgaccgtcctgacgaatatcggtcagcgtcaggttgatttcatgcgcgctattctccaccacgctgcgtggattatcggttttcacctgtagcaccggcagatgatttttatcaatttctgttttcatccagtttaccgtttcaatttgtcgcgccagcgtcgcctggctattttttatcatgttatccaggggaattatccctgcgtaatagatgacggcgctgcataaagctcccgccgctatttttaaaatgaatttttctctggtgctgtattgttgataacgagatgtaaactgtgcaattcgcgctttcatttatatttccctgtaatcatggccgtatacggcgcgtcctttgaaataggctgtaacgtaaaatcaaaattcgggctggcctgatgaatgaattcctgtaatgcctgcgcgttttgcgcactcacgcttaatgtcagagctccctgcgtgtcgtcatattcaaacagcgtaatttccatcgacggaacggactgacggatcttttccagttcgtccatctgcaaaaaaatgccttttggctgcttcttgatgttctgtccaaaatggtacttaaggttggtctgatgacgcatactcggaaaatggtgttgataaagctcgaccatctcctgctgcacctgattttcccgatctgccagcatccacgccagggtgatgcgggggccgagcagcaggcccagagagagaagccccatcaccgcgatggcggccttcatccctttcgccgccctcgcgctggtcgctttcgcgctgaacgcaccgtgcagcacgttgacgcggcacgcccgccactgcggctggatcagcaccagcggatgttctgccgccagctgttcgtcaacctcaatgcctggcgggatgtccccgtagcagcggacctcgccctctccggctttttgcatcagcagcggcaacaggccaacctcaacgttacaggcgatatgcggcgacaagcgcaaccagtagttctcttcccgcgcaaccagcgtgcttccacccgccgtgaccggcagcagccaggcgtcaggcaggacctgaatgaccttcaggcccgcctcgtgaaagcgggtcagccactgctgcaggcgggcggaatctatcgccacggcgtccacctcggcgccttttttgttcagcaccgtccagtggagatcgtccacctcaccaatcagagtctcctccgccatccacgagaaggcggtcgcctgcgacgccattttcttcggcagcgtaaagtggcggaagatcatctcactggcgggcagcagcagacacacgcgcgcagcaagaggatggtcggcaagggtatgcagcgcctgcggggtgtccagggttgtaacctgttcgcttcccgactcacaccacatgattttcccgtcctcacggctgtcgggacgaacaaaaaggacctgtttcatagcgttctacttttcttattcaatcattcggtaacgacgttgccacgtcacaatttcaccggcttcgttattcacctgaagctggctcaccacgcgaagcgttaactcatcggtattgccggtgtagttgacgcgaaaataccggctgttgatggagagcagcccggccacctgcggcaactcgtccttcaactgcggggtggcctgttccagcgctttgctgaagacgtccatactttcccagccggtttccggccgcgactcaatcaggcgtacggcatcgtccgcggtgagttttcccgggaacagggctgccagtaagggcgcctgctccggcgtcagagtattgacatccaccttgctggccgagtccggcagcgcgcataacagcttgctcactttcgggtacgctgcagcaggaaacgccggcagcagcttgatctcggcaagggtgcgcatcatctgattcgcaggctgacgcgccggcactacgccagaccaggcgtccatctccgcgccctctttcaccgtcgtggcgtcgccgtcgagataatccaccagctgctgataaatttcttccgccgccgtctggctgatgccgccgtccgtcaggatctgctcgacaatcttctcttttcgcggtttttccggcacggttgacgcatttttatcctgagccactttgtctgcggccagcaggttattgacgttgaagcagtcctgcgcgtcgtcgacctggctgaccaccgtatagtcttcaccctgcgtctccagcggcaggtgccagtcgccctccgggtcgagcggtttgctctcgccgctggcgtcgttctgcaaccggtctttcaccactttttcctgcgcctgcattgcccagcgcagctgctgctggctcacctgatagtgggttttctgcaaattacggcagaactgctggctgattttggccgccagggccgacatcatgaccagcaggatcagcacaaccagcagggcaacaccgcgttgctgatggacccggctcatggcttcacgtccggcgcaggcgcattttgcggggcaggcgcgttttctgccgccggtgccgccgcttctggtatctctcacggcgtggtaaacacccagcgccaggtgtcgccattttccatggtcagcgtaagctccacgccgtctggcagatgggcagagtcaccccagcttttttgccagccctggtgataaaaccgccattgcatcgctttcacctcgctgacgataggcacttcatcgggtttgacgtccgccgggctgtcaatcaccggccagacgtcgcgatacagacgcccttcttccagccgccagcgcacgcgctccagctggaccgtgccactcacgccgttcagcgtggtaaattccacggcatcgccatcctgtaaaaacagatccggcgcgttgcgcggcgcccgcgcctgcagctggaaaaaatcgcgctccatcaggctccaggcacgctgaagctgattaagcttcgccgcgcgggtatcggttgccgaactggtgcgcatcgcgccgtcgagaatttgccaggccagggtgctgatgaccgcaaaaatggtcagcgcaatcatgatctccagcagggtaaaaccgcgctggcgtcggctcgtcttcacttgctctcttctcccggcccaatgatctgaagcgaaatgaccggctggcttttatcgccttcggcgtaaacgcggatggcattggcccaaccgctattggcggttttcacccgctgcttatgccagtaccagctgcgcccccccatgatttccgtcccctgctcctcggcatcgggaaaatcggttttgctgagctgggcttcagccagctgattttctgcaacccagctggcctgcagcgtttcggccagcccatgggtgaagcgcacgttcagggagacggaattcatcagcgccagcgcgtcggtggagaaaatgaccagcgccaccatcacctccaggagcgtcatcccgttctgcttaaccttgcctttagtcatcgttctctaccgaaaccggggccgcgccctgcgacaccacgcggaagtgatgctgtttgtcgtaactttgcagcgtcagcgtaaaacggccaatctcaccgtccggcagaaagaggatctgggggtcggcctcgacgttagccgccagacgctgaggcgagagcgacacgtgcatctcttccgggaaatcgcctttcgtggtaatacggccggcggataacggcacccagtgacgttcgccgtttttatcgtcgagcgtgaccagctgatatttatcggtagcgatcaccagcccgacaatatttccgtccatgaccgcgcggtctgaacaataatcaacgagggcttttaattgctgaccaaatatatccgcaccgctccgtgagggtattgttgagacaaccatcatggcgcaactggcaaatatcaccagcgccagaataatttccagcaacgtaaagccgcgttgattcttcattatttctctttcttatccagagaccagttcgtaatatcgtctgcggtgttggcttcgccatcaggaccggcagagaagacgtctacggcgccgtgttcgcccgggctgacgagcagataatcgttgccccacggatcctgcggcaggcggcgaatatagccgtcggcgcggtagccgttgggaataggcgcgatctcaggcttggtcaccagcgcctgcagaccctgctcggtcgttgggtagcggtggttatcgagcttatacatatccagcgagccttcgagcgcaacaatatcgctggtcgccttttgcgcgtccgctttttctttgttacccattaaattgggcaccaccatactcgctaaaacgccgagaataacgatcaccaccattaattcgagcaaggtgaaccccgcctggcgagccagacgttttgtttttatagccatgatttaacctaccatattattaagttgcagaagcggctgtaatattgacagcacgatgaataaaacaatcgtcgccatggagaccaccagcgccggttcaaataccgagagcgttaacgtaatacgatgctgtagcgccgactcctggttttccgccgcgcggtccattaagttgcctaactcgccgctctcttcgccggaggcaatcatgtacagcatggtgggcgggaataatttcgcctgctccagcgcggcatagagcgaggccccctgacgcacggtatccgccgcctgctccagcacctgccgggcgtagaggttttcgataccgtccatcgcgatatacatcccttcaagcagcggcacgctgctcgcctgcaggatgctgagcgtgcggatatagcgggcgctgttgatcgcgcacaccagctttttaatcggcgagccgttcaccagccagctgtgccagcgaaaacggtttttggcgtttctgagccaggtcttaaaaccaacaaatccgccgccgaggatacccacgatgtagatcccgtacgcctgcaggaaatcgctcaccgcaatcagcgtgcgggtggtgatcggcagctgctgcttcatgtgggtgaactgctcgatcacctgcggcaccaccgccaccagcagaatgctgatgaccgcgatggcgaccacggtgagggtaatcgggtagaccatcgcctgcgtcagcttgctcttcatcttctggcgctgctcgttgtactccgccagcttttccagcacgtcgcccaggtggccggttttttcaccggccatcaccagcgtgcagtagagcttgtcaaaggtgcgcgggaactggctgaaggcgtcgaacagggtgtgaccttccaccaccttctcgcggatctccaccaccattgccgccagctttttgtcttccgtttgcttcgagatcgctttcagcgcgctctcgagcggcagtgcggcgttgaccagcgtggataactgacgggtaaacatcgacagcaccggcgtggagagcctggctccggtttttgcttttccggcagacgccgcttcacgggtttcgctgatgctgacgggcatcagcttttgctcgcgcaacatctggcgaacctgcttttgcccctcggcctgcagcgtgccgcgctgggttttgcctgcgacatccgtcgccgtccaggcgtagaaggccattacgcctcccccccgcgctcggcggtcacacgcatcacctcttccagcgaggtgatgccgctaatcaccttcagcagcccgttttcgcgcaggctgtaagcctgcttaaagagctgcgtctcgatggacatttcgtctttatcttcatgaatggcgcggcgcatggcgctgtccaccaccaggaactcgtgaataccggcacggccctgatagccgctctggcggcagtgttcacagcccaccgcgcgataaatggcttttggcggcgcgtccataaagctgaacagcgctttttcattggcatccagcggactggtggtccggcagtgcgtacacagccgacgcaccagacgctgggcaatgacaccgagcaacgatgaaccgattaaaaaggactccagccccatgtcccgcagacgcgtaatcgccccggcggcgctgttggtgtgcagcgtagacatgaccaggtgaccggtgagcgacgcctgtaccgcaatttgcgcggtttcaccgtcacgaatttccccgatcatcaccacgtccgggtcctgacgcagaatagcgcgcagcccgcgggcaaaggtcatgtccacgcgcgggttaacctgcgtctgccccaccccttccagctcatattcgatcgggtcttccacggtcaggatgttgcgttcgtggccgttcagcgccgaaagaatggcgtacagggtggtacttttaccggagcctgtcggcccggtgaccaggataatgccgtgcgggcgctcaatcagcccttttaacttctccagctcttcatcgatcaggcccagcttgttgatgtcgggcttgagattgcttttatcgagcaggcgcatgaccacgcgctcgccgtactgggacggaatggtcgagacgcgcacgtcgatcgccttgcggccaatgcgcagtgagatacggccatcctgcggcagacgtttttcggcaatgtcgagtttcgacatcaccttgatacgcgacaccagcagcggggcgagcttacgcgccggttgcagcaccgggcgcagcacgccgtcaacgcggaagcgaatgctcagcgtgcgctcgaaggtttcgatatggatatccgacgcgccgtccttaaccgcctcgccgagaatggcgttgatcaggcggatcaccggcgagttttcgtcgttatcaagcagatcttcgttatcagggatctcctcggttaacgccatcaggtcgatatccgcatccatgtcgtccaccagctgctgtgaaacgccgctgctctgctgccagattttggccagcatctcgtcaaacgcttccggcgtcacagtaaccgggacgaacgcgcggcccaacacccggcgcacttccagcagtgctaacgccggggtgtcctcacggatatagacgtcattgttgtaaagcagaacgccgttatcttttgcgtagctgctgctacacagtgttttactcagttcgtccacgttgcccctccgccttactctttaaacggattgcgtgtcgcgcgggttttcaccggtgcggcgtgagggcttgctgaaggaaacgcgggcaggacggcattgtcgctcggctcaacaataccgagctttttctcttccacgcgctgcatctggcgcacccggatctggtcatatttctctttcgaggccgcgctgtagttgtcgtcgtcacgcagcacggtggtatgaatgaacaccatcaggttgcgcttggaggtatcctgggaggtgtagcggaacagctgaccgaccagcgggatatcgccgagcagcggcactttggacacggactgtttggtcacattttccatcagaccgccaagcaccaccgtctggccactgtggaccatcacttcgttattgatcgtgcgcgtattgaaggttgggccgaggctggagtcttccgtcgcgctgttgtcgacgctggagacttcctgctcaatcttcagatggatcatgtcgccatcgttaatctgcggcacaattttcagcttggtaccgaccgtcttacgctcaacggagttaaagacgttgtcgccgctggtggtttgcgaaccggaaagtaccggcacatcctgacccacgttgaacgacgcttctttgttatccagcgtgaccacgcttggcgtggagaggatgtcatttttgccgtcggtggaaagcgcagtcaccagcgcaccaaaatcaccgttaaagaagccggtcgccaggccagtgaagcttgcccctttcatggtgccatttttaatctggctgattggcaggccggtggagccgaactgcacgccgccgtgcttgctggtccactgcacgccgagatccaggccgttcccgtcctgcacttccgcgatgatggcttccaccagcacctgcggacgacggatgtccagcttgtcgatcaccttctcaagggagttcatcacgttaggctgggcggtaatcaccagcgagttggttgcttcgtcggcggtaatgttcagatcgctggacgctggcgcggttttcgacttcggcgcgccggccttgtccttcagctgctcgccgatgccggtgagtaccggcaccaccttagtggcgctggcatacttgagatagaagacgcgggtattcccctcgttgttctgctcgcgatccagctgatggatcagggagcgggtccgcgcgcgcgcatcttccgaaccgctgatcaccaggctgttggtttcgtcatcggccaccactttggtcgccagctgcggcgcgttctgccctttctgctcttcgttgttgaggttattcaacatctccgagagctctttggcggacgcaaagcgaagcggcacgatttcacgacgctgaataccgtctttgtccacgcgctggaccagatccaccaggcggttcaccaccgaagctttaccggttaacagcaggacgttggacggctcaaagtggaccacgttaccgatgccggtggcatcgttgagctgacgcagcagcggcgccagctcgcgaacaggcacgttttccatgcgcacgacacgggtgatgatctcgtcgcctttgcccggatttttaccgtcggccagcggcgcaccggcggtgcgggcaatgctcgagcgcaccactttaaccatgccgttatccatcgggatcaccgacaggccgtacaggtccagcacgctcaggaaaaactggtaatattcgtcttccgtcaatacgttataggttctgaccgacaccgtgccctgcacggacgggtcgaccagaatggttttgttcagattgcggcctaccgtatcaataaattcgcggatatcggtgtttttaaagctggcgctaaagttagctgcgagcagcgaactggaatataacgacaatgcggtcagcgccacgcacgcccaaggaaatttcttcatgtctgtacacttgttaattgtttagaacattgacccgaatattttcaaggtgagcgtgacgtctgacgacgacctccgcttctttcattttcgaccagttggcaataatatcttttgccttttctgcatcggtcatatcgacagaattgacttttaccgccacatcacctttttccagaccggcatgactgtagaagtcagaggcattccttggattaatgttgtagccttccagctggcccttttcgataagtggctttaacacaagataatcatccagatgcacgctttcagcaccagcatctttcgtcgattgggttaccgggccgctgtcaacgccgcccttaaaatagtcaggtttatttaacgccagtacctgcgtagcaccttcgtaattaaccaccacattgtctttgtttatttcctgaataaaggcatcgttaaaaccggtcagcgcttcgccttcgcgatagctcttttgaccacccggcgttttgatcacggcgaaggacaaccaggcatcgtcgctgcggacgatcccctcaatttcggcagcgagcggggcttttccggctgctggcaggttgtcctgacgcacggcggcggtgaaaagtgaaaatgtcttttcttcctgacgttttttttgcggtttcgccgctgcgttcgcgagtttattcgtcacttttttataatctttaaaaatgacgtagccttgctgaccgcaaaaaatcagcaatacaaacataatacagggcgttatccaccgtgaaaaaagtgagagcctcattattcatctggcctttagcaaagcggaaataagcagcgtcatgctgcgccaatatgtgacataaatagtaattagcggcctgacaatcgaccacctgcttcgccgttaactttgataaagaaaaagattgaccgtcaaaaaaaccagtgttagaggtagccgacaggttatttttaccctgcccgtaaattgaccatgacgcacccttgccgtacttttctgggccattgctattcatgcccagagacggtaagtcgttatgtatcagagtcattttaaatttaatcacccgccttttcgaaaaatcacccgcgcctcgggcgatttcttcgtgccgtatcaccaggatattttcaacctgctgaaagagaaaacccaacaggcggggattattgggctctttgcagacgatgccccgctgctgggccagttcagcgacgccctgaaatccgcaacccctgacgttattgccatcaacgcgtttccaaaactgagtgccagtagcctgctgtataaactcaacccgggaacgaaagagagcaaaaaccggcttcaggcggtggatgccatcctgcaccagtggcaggggggaaaaagcaggacgaaagtgctggtgattagccataccgatgccatgaaagagacctgtcgggaggtgctggctctgctgctgacgcgcgcgcaggagctggagtttcgtctgtccgtcgtattgatgggtgcagcggatcgggaagccgttctgatgcagcagtctgaactgcgtgaatatgcgcatacctgccacaccctgcgcccccttacctgccgggagtttctcagctacgttcaggcgcagtgtgaaacgcacgggtgtgagcactcgccgttgaccccggcgcgcgtgcgtaaaatgcatgcgctgaccaaagggaatatcagcaagctgaacgagctggcgcacctgtcgatgctcgccgcctggaccgaacgtgcagaacaggttagcccgcgtcatctgcgcctggcggccggtgagatcctgcctgcgaaaaaacacggtatgcgcctggctaccgtggggctgttcgcctccgtgctgttcgctgcctgcggctggtatttgacctcctcgatcggagcaagacttccgattcaactgccggtgcccgcgagctggaaacagcagacgcccatcgagcaggcgccggtggtgccggctatcgacaacgaggtggttaataagccggatgcgatgcatcagctctatctgatgtgggggtatgacgcctcggcggacgatgccctgtgccagaacgccgcgaaggtgaacctgatgtgtaagcagggaaatgcctcaccggacgcgctggcacaggaaggatatccgtgggtgagtgaactgaaaaccggcaaccaccttaactatgccgtggtcgcccgcgtcggggataactcactcgacctgctgatgaataaccgcacctggcaggtaagccgtcactggtttaaccagcatgccaccggcaattatacccaactccaccgcctgacgccggaaggcaaagacgccatcagcgccgccagcgatgcgaaggacatggggtggctggatcagcagctgagccaggcccttgccgagccggaaacccacgctcaaacctggacgacggagatgatgaaacgtacccgcgagttccagcaaaaaatgcatctgcgcgtcgacggtatcccgggtgaagagacgctgatgcagttgatgcgcgacactaacaccacgccgagcgtgctgcttcagaccccccatgccgcaccggacgcgaaaacgcaggagaagcattcctaatgtctaccatctgtcttgcggctcagcgcagctacgtttccggggaggcggtctggttttcgtaccgcattccccgcctgagaaaaatcgcttctaacgcctttttaggaatagtaagcctctgcgtcatgctgatggcggggctgtacgcccacgtatactggcaactgcgccaccctgcgccggagccggtaaaaaaagtgaacgtggcgaagcccgagacgcagctttccgatatgcactacgtgtacgtgagcaagccgttcccgcatccgcacccgaaacccgtcccggtgcaggccgacgtccctgccatgcaggatctgccgattaacagcgacgacgccgactggcagcagatgcctgacggcacggtgccgcacgataccgcgcgggataccctccccggaacggaagcgcacgacgatgccgtctccccccgcacggagggtgacgacgcatcattaaccgaactgtttaagcaggcgttaaaagaacaagagcaggattattcgcaagggaaaatacccgcaccgccggttgacgaaacgcaggataatactcaggcgggcgcattacataaagaaagttcccggtctccattaagtaaaaagggagaccggctggaatagttaatatttttcaggcaggttggtgatattaaggagtcgacccttttccaccacaatgtattgaccttttttcagatcggagaggatttttataatcgtactgcgtgccagactggtgtattcctgaatataatcataaacattaatatcgcgttgatgatgtacaatcagttcattaatttccagcaaaaattcgcgcacgacagaataggcgctgcgggcaaccagcacgtcatcgcgcttgctcaggagacagatataccaggccagcaccttggtgagttcaggccacaagcctttctcggtcatcagttgagagaaaacgcttttcggaatcgagcgcaccacggtattcgagcggaccaggccatacatatgggacgaatgataaaaaatggaagagagtccaaaaatgcactgcccctgcagggtgaacaagcagagctcgtcggattcgcggcggaattccacttcaccgctgacgataatatgaataaattcattatcgacggtggaaattttttgccatttctttaacgatttttcttcaaatccttccgttgcggaaatgattttttctatttcatgatgaggacgcaattttctgccgtaaatgcttaacattgttatacccgaattaatatgtaaattttagataaaaaatggccacggtggaaccaccgaaactattcgtataatcctgataaaaaacttcaaggagaagtgataataaaaatcactatgcaggtgttattttttataaatacttagcaagctatacgtctatcttaaatgagggtacttttaagccaattaactaaaaatgaattgagaatgtacttaagattaatctcaagaaaactaaggtaatacggcctggtcaggggcagccctgaggactacccttgcccgtacttctctaaaagcgcctcggcgatggccagggtttctacgtcagccacgccgttccacagcgcggggcggaagtgcatttgaaacgcgctgatcaccctcttctgctgctgttccgtggcgttgtccggcacctcgtagccatagcgtttcagcacatcaagcagcgcaccgcgctcgacctcctgatagcgcggccgcccgttaagatagaacgccacgcgcgcgggatcgggccaggctcctatcccctgctgcgccagctgctgccacggaaacagcgggccgggatcgtctttacgctgcggggcaatgtcggcatgggcaaccacgttctgcggctgaatgtcatagcgggcaataatgtccctggcaagcgggatcagcgctgcaatctgcgcaggcgcaaacggggtaaaggttttcacgccgtcacgcgtttgccagccgcggttctcgagctcaatccccacggacgtatcattaatccggttggtgccgcgccagaagctaatgcccgcatgccaggccagctcgctctcgggaaccagctgccagatgcgcggcttgccgtccggcgccggggggctggcggggatcaaatagtgagagctaacgtttttatccgtcagcgtggccagcgagctgtcaaaatcatccgcggtgtagtggatcaccagcaccttgatgcgcgggtaagccgcctgcgcctgatgacgtgtatccagctcgtaggcacctttatcgataatccccttttccgtaacgcatcctgccagcagcagcgccagcaggagcgtggcaaacgcacgcctcatcgcagggttttcaccgccgtaccgcttacgctcaccatcagcatgctgccgtctttcccgaccgtttcgtagtcaatatcgattcccacgaccgcatccgcgccgagggcttccgcctgctcgccgagctctttaaaggcgatttcgcgtgctttgcgcagctctttttcgtatgcgccagagcggccacccacgatatcgcggataccggcaaaaaagtcacggaagatattggcgccgagaatcgcttcgccggtgaccacgccgcagtactcggttattgtctgtccttccagggttggcgttgttgaaaactgcatggtttctctccttctttagcgttcaatgccttaggcacagcattatcggttcgttacgctatgattgaaaggatagttaataaataaggaaatcaacatgcgctattcagctttaacacttttagtgccctgcgcgctggtgctcagcgcctgtaccaccacggtcacgccagcctttaaggatatcggtacccgcagcggcccctgcattgagggcggcccggacaccgtggcgcagcagttctatgattaccgcattcagcaccgcagcaacgacctcaccggcctgcgcccgtatctgagcgatggtctggcaaaactgcttaacgatgccacccgcgatccgcagcacaacgcgctgctgaaatccgacccgttctccagccgcaccacgctgccggacagcgcagaagtggccagcgcgtcaaccatcccgaacacggatgcccgtaacattccgctgcgcgtgaagctgacgcagggcagccaaacctggcaggacgaagtgctgatgatccgtgaagggcagtgctgggcggtggacgacgtacgctacgtgggcggcagcgtgcatgccccggccggcacgctgcgccagtcgattgagaaccgctgattcatcagtgataaaaatgttacccccgtaaaatgtccggcatttctcgcggaatgccgacatttatactcgccgcctttgcccttcgctattttgtgctatgtttaagaggaaatacgggttatatttaacttttaacgcagaaatattgcataactattctgtcaacggtactatctgcggcctcaattgctatagattgcctggatgagtaaagactgccccgatgagtattaaactaaacggcattaactgcttctacggcgcacaccaggcgctgtttgacatcacgctgaactgcccggaaggcgaaacgctggttttgcttggcccaagcggtgcaggcaaaagttcccttctgcgcgtccttaatctgcttgaaatgcctcgttcaggtacgctggcaattgccggtaaccattttgatttcgcaaagacgccgtctgataaggcgattcgcgaactgcgtcaaaacgtcggcatggtcttccagcaatacaatctctggccgcacctgaccgtgctgcagaacctgattgaagccccgtgccgcgtgctggggttaagcaaggatcaggccatcgcgcgtgccgaaaagctgctggagcgtctgcgcctcaagccctacagcgaccgctacccgctgcacctgtccggtggtcagcagcagcgcgtggccattgcccgtgcgctgatgatggaacctgcggtactgctgtttgatgaacccaccgccgcgctggatccggaaatcaccgctcagatcgtcagcattattcgcgagctggcggaaaccaacattacgcaggttatcgttacccacgaagtggaagtggcgcgtaaaaccgccagccgtgtggtgtacatggaaaacgggtatatcgttgagcaaggtgatgcgagctgcttcgctaacccgcaaaccgatgccttcaaaaactatttatctcattgattgtgtcaggggaaatataatgaaaaaagtattacttgccgtgctgcttgctggcgttaccctttccgctaccgcagctcagaccattcgtttcgccacggaagcctcttaccctccgtttgaatccatcgatgcgaacaacaaaattgttggctttgacgtggacctggcaaacgccctgtgtaaagagatcgatgcaacctgcaccttcagcaaccaggcgttcgacagcctgatcccaagcctgaagttccgccgtatcgacgccgtaatggccggtatggacatcaccccggagcgtgaaaagcaggtgctgttcaccaccccttactacgataactctgccctgttcattggtcagaaaggcaaattcacctctgtcgatcagctgaaaggcaaaaaagtgggcgtgcagaacggtaccacgcaccagaaattcatcatggataagcatccggaaatcaccaccgttccgtatgacagctaccagaacgcgaagctggatctgcagaatggccgtatcgacggcgtatttggcgataccgctgtcgtgaccgagtggctgaaagccaacgacaagctggcgccagtgggcgacaaagtgaccgataaggattacttcggtaccggtctggggattgccgttcgtcagggcaacactgagctgcagcagaaattcaacgctgcgctggaaaaagtgaagaaagacggcacctacgaaaccatctataaaaaatggttccagaagtaattcctgatgaatgaaatttttcctttagcaagcgccgccgggatgaccgtcggccttgccgtttgcgcactgattatcggcctggtgctggcgatgttctttgcggtgtgggaatccgcgaaatggttccccgtcgcctggacaggctccgcgctggtcaccgtgctgcgtgggctaccggaaattctggtggtcctgttcatctatttcggttcctcgcagctgctgctcacgctctcggacggcttcacgattaatctcggctttgcgcagatcccggtgcagatgcagatcgacaacttcgacgtcagcccgttcctgtgcggcgtcattgcgctctccctgctctactccgcgtacgcgtcgcaaaccctgcgcggtgcgctgaaggccgtgccgcagggacagtgggagtcgggtcaggcgttagggttgtcgaaatccgccatcttcttccgtctggtgatgccgcagatgtggcgtcatgccctgccgggcctcggcaaccagtggctggtgctgctgaaagataccgcgctggtgagcctgataagcgttaacgatttgatgctgcaaaccaaaagcatcgccacccgtacccaggagccgtttacctggtacattgtggcggcggcaatctacctggtgatcacgttgctcagtcagtacatcctcaagcgtattgacctgcgagcgacgcgctttgaacggagaccaggctgatgcttgaatactttcccgagttgatgaaagggctgcacaccagcctgacgctgaccgtggcgtccattatcgtggcgctgatcctggcgctcatcttcaccatcatcctgacgctgaaaacgccggtgctggtgtggattgtgcgcgggtacatcaccctgtttaccggtacgccgctgctggtgcagatcttcctgatttactacggcccgggccagttcccgtcgctgcaggaatatccggttatctggcatctgctctctgagccatggctgtgtgccctgattgccctttcgctgaacagcgcggcctataccacccagctgttctttggtgcgatccgcgccattccggaaggccagtggcagtcctgcggggcgctgggcatgagcaagaaggacacgttggcgatcctgctgccgtacgcctttaagcgcgcgctctcctcctactccaacgaagtggtgctggttttcaagagtacctctctggcctataccatcaccctgatggaagtgatgggccacgggcagctgctgtacgggcgcacctatgacgtgatggtgttcggcgcggcgggcgtggtctatctggtggtgaacggtctgctgacgctgatgatgcgccttattgagcgtaaagcgctggcgtttgagcgcaggaattaaccgcgcaagtgcataaaacggtattcatggagcgggtaacctgatgggttatccgcttttttttcgcgctcaacacaatatttaatcatttttattgcatacaaattcattaactggcattgtacatccaggccgcagacacggcgcatcaataagacagacgggagcattacaatgaaaaagttagttctggccgcattacttgccaccttcgccgctggcgcatccgctgcggataaaatcaatttcggcgtctccgccacctatccgccgtttgaatcgctggatgccagcaaccagatcgtcggtttcgatatcgatctggcgaaagcgctgtgcaaacagatgcaggccgactgcacctttactaaccatgcttttgacagcctgatcccgtcgctgaagttcaaaaaatacgacgcggtgatctccgggatggacatcacgcctgagcgcagcaagcaggtcgcgttcaccgacccgtactacgccaactcggcggtggtgattgcgaagaaaggcgcgtatacctctttcgatcagctgaaaggcaaacgcatcgggatggaaaacggcaccacccaccagaagtacctgcaggacaaacatccggaagtgaaaaccgtggcctatgacagctaccagaacgcgattatcgacctgaaaaatggccgtatcgacggcgtcttcggcgataccgccgtggtgaacgaatggctgaaaaccaacccgcagctgggcaccgcaacggaaaaagtgaccgatccgcagtacttcggcacgggcctcggcatcgcggtacgtccggataacaaagccctgctggaaaaactgaacggcgcgctgaaagcgattaaagcggacgggacgtaccagaaaattagcgagcagtggttcccgcagtaatgtcttttgccgggtggcggcttcgccttacccggcctacggggggagttgtaggccgggtaagcgcagcgccacccggcactctctcacaacggcacaaagaacctgaaccgcgccccgctcgccgactccatcagcctgatcccgccgccgtgcagctccagcatccgtttcacgattaacagccccaacccgccgcgattctctctcgacgcctgggtgttgagcgccgacggccgctggaacagatcgtcgcgcagcgaggcatccacgcccgttccgctgtcggacacttcgacctgcagctgttcattttcctgccacaccgccagacgaatttctccgccgccaggcgtatggcgcatcgcgttatccagcaggttggtcaccacgcgttcaatcatcgacacatcggcgtttaccatcggcagcggccccggcacgtcaatatgcagatttacctctcgcgtgcgggccgtgagctcaaacttctgcgccacgtcggaaatcagctccgccattgcgaaccgctcgcgctggggtttaataccgccgtgttcaaggcgcgccagctcaaacagctgctgcgaaagatgacggaccttttgtccctgacgcagggcggtggcgagatactgctggtgctcctgcggcgtcagggtggcggatttgagcgacagggtttcgagatagcccagcagcgaggtgagcggcgtgcggagatcgtgcgaaatattggcgataaactcacgacgctgacgatcgctgtcggccagccgatcccactgttgggtgattttgcgcgccagctcgataaagctgttgcgcaggatcgccacttcatcttttgccgccgcgtccggcgtctgtcccgccagcagcctgatggcgcttatgctgtcctgctccagcccggcgacctccaccgtcagctgtttgaccgggcgcgtgacccagtaccagaccagcagccctgccagcagcccaaacagcgcgacccacagcagcgaccacaggacggtactccacagcgccttgtgccaggccatttccgccagggcgttcgactcctcgccctgcaaaataatgtacagatagccttttagctcgccgtcctgccgcagcggcgtagcgctaaagactttttgattttgactgcgcggatcgtcgcccagtaccggcatggcggtgccgctcaggaagctctgcaccggtgccaggtcgattttttgccgctgaatatggccgggcggggcagcgtcggcgagaatatcgccgtccggggagacaacgtagagctcaacgctcggattaaaggtcatcagccggccaaacagcggtttcagcgcgctgcggtcgaccctgccctgcgcgtccagaatcggttcgcgctggacgatctgctgcgccagcccgcccgataaccgctgcaccatcgcattaccgtactgcatgctgctgtagagctggaccgcgcaggcgacggcggcgcagagcatcatcagcaggatgaagagcagcgtcagacgctggctcaggctaaagcgacgcatcatgctgcggctccgcaaatttgtagcccttgccccagacggtgcgaatgatctccggctcggcggcgtccttctctatcttgatgcgcaggcggttgatatgggtgttgacggtgtgctcgtagccttcgtgctggtagccccagacctgctccagcagcgccagacgggagaacacctcgccgggatgacgggcaaagaagtagagcagctcgaactcgcgcggggtgaggtccaccacctggccgtgaagcagcacgctgcgcgccagcggatcgatggtcagcccgtgcgcctgaatgtgtccgtcggtttgcgcctgccccatcgcctgctggcgacgaaacagcgctttgatccgcgcaatcagctcctgcacggagaacggttttgccagatagtcatcggcgccggtttccagcccggtaatgcggtcggtttcgctgctgcgggcgctgatgatgatcaccggcaggtagcgcgtcatctgacggatgcggcggcaaatctccagaccgtcaacgttgggcagcatcaggtcgaggatcaccgcatcccacgtctgggcttcaagacgctgtaaggcgttgcccccgtcgggctcgtgggtgatggcgtagccttcgtcttctaaattgagtcgcagaagcgccgcgatatcgtggtcgtcttctaccagcaggatctgcttcatggataagcctatattcatgtcttatgacgtaagcttacctgatttcgccgggatgaagagttcacattttgtttaagattttacgagcaacgtcaacacttcataatgcgcggtgtgcgggaacatatcgaaaagctgaacgcgttcaacgcgatagcccggcagttgagcgatgtctttcgccatggtctgcgcgttgcagctggaatagatgatgtattccggcgccatctggctcaggtagtcgcatagcgcattcccgatgccgcggcgcggcgggttaaccagcaccagttccggcacgttgccctggccggtggcgaactgcgtggagtcgagcgcctggaagcgcagattcgttaaccccagctcagaggcagactgcttcgcgcaggcaatcgcttcggcagagatctcaatcccggtgagctgcatctccggcgtggcgcagtgcaggccaaacccgcccacgccgcagaacagatcccacatatgatgaacgttcaacgcacgcacccagtcgcgggcggtggcgtacaggctgcttgccacggtcgggttggtctggaagaagctttgcgggcggatccacagcggcacgccgttgaagcgctccgccagcgcgtgctggtcggtgaagaaaatctctttctccccttccatgatcgccatatgcaccggctgaatgttcgccgtaatgaccttcagctgcggaagctgcgcctgcagccaaggcagggccgcgcgcagctgctcaagcttagtttcggagcgcagcacgaagcgcagcatcatgccgccgtcgatctggctttcggtcagcagaaggtatttcagctcgccgcgcttgcgggccacgctgtagggcgttaaccctgcccgggcaataaacggcttgagtgcggcaaagaccggtgcaaaggagtcaggatacagcgggcagtcggttaagtcttccggcgtgccgtcgcggtgcagcatccccagcagcggtttttctacgctgccgctgaccaccattttggctttattgcgaaaaccctgttccgggccgctgacgggtgcacaccactcgcccaccgcgtgtgctgccagcagctgttgcaggtcggccattttggcggtgagttgttgagagaccggctgttctatccactgacaggagcggcagcgtccggcgtcatagagtgcgcactgcatatcaaaaccttaagaatcacgagggctgcgattatacacattattgcaggcggaagaaccgccgactggaggccggaacgaagaggagacagagcaccagcatatccggcagcttttgcataaacagcgcgcgcaggatctcacgtttggattcaccggcaatgctgaacagctccgggtagccgtagcccagcgaggcggcccacagatagctcgccgcggtaatctgcgtcagcagatagatccagcgcgcccagttgcgccctttgaccagcgaaaacgcgcagtaaatctcgataaacaccagcaccaggctgctcaaaaagaccagcgtcagattccacgtctgcacgctgcggtgaatgaattcaccgatgccgcgcacgcccagggtgtttaaaatcattagcacgtccaggcagcggatcataataatggcgagcgccgccacctgaaccagtgcaggtacgttaggacgcgcgtgcgtaatacgtgatttttttaataatcccaatgttttacttccctgaaaaacagtgccgcgtcatgcgcggcacatcactggaaattttaaatccttcagccgcgtcttgcacgctggatatcgcgcacgcgctgtttttccgcgcgcgccatcaaataccaggcgataaatccgacaattccgaccacgccgaggatgatagaggccagggcgttgatctccgggttgacccccatgcgcacgctggagaagaccagcatcggcagcgtcgtcgcccccgggccggaaacaaagctggcgatcaccagatcgtcgagcgacagggtaaacgccagcagccagccggagatcaccgccggcataatcatcggcagcgtgatgatgaaaaagaccttcagcggcatcgcgccgagatccatcgccgcctcttcaatggagcgatccagctcgcgcaggcgcgaggcgatcaccaccgctacataggcggtacagaaggtgacgtgcgccagccagatggtgagcatcccgcggtccgccggccagccgatggcgtgcgccagggccacgaacagcagcagcagcgcgagaccggtgatcacgtccggcataaccagcggggcggtgatcataaaggcgaagccgttcgaaccgcgaaaacgcccgaagcgcaccatcaccagcgcggcgatcgtgcccagcacggacgccatggtcgccgccagcgccgcaatggtcaggctcagccccaccgcgctcatcatcgcatcatcgtggaacagctcgctgtaccagcgcgtcgaccagcctgcccagaccgtcaccagcttagagctgttaaacgagtagatcaccagcatcagcatcggcgcatacaggaaggtaaagccgatgaccaggatcgcaattcgccacggggagcgcactaccggtaagttattcatccgcgatctcccatctgtttctgctgatgcttgtggaaccacatgatcggcacgatcagcagcagcagcatgacaatcgccaccgccgacgccaccggccagtcgcggttattgaagaactcctgccacagcacgcggccaatcatgatgctgtctggcccgccgagcagttccgggatcacaaactcccccaccgccgggataaagaccagcatcgacccggcgataatgccgcctttggtcagcgggacaatgacgctgaagaaggtttttaacggacgggcgccgagatcgagcgacgcttccaccagcgagtagtcaatacgcgtcagcgccgtgtagatcggcagcaccataaacggcagataggcgtacacaatgccaatatagaccgcgaggttggtgtgcaggatcgtcagcggctgatcgataacgcctaaccacatcagaaaattgttcagcacgccgttgtttttcaggatgcccatccacgcgtaaacgcggatcaggaacgaggtccacgacggcaggatcaccagcagcagcaggatgtttcgcgtcgacggcttgctgtgcgccaccgcccacgccagcggatagcccatcaccagacagcagagcgtcgagatcgccgccacctgcagcgactgcagataggcttcgaaatagagcggatcgtcggtgagctgcaggaagttacccaggtttaaggtcagcgtcagctgcccgtcggcccagtccaacaggttggtgtaaggcgggatcgcccgcgccatttccgccaggcttatcttgaaaacaatcaggaacggcagcaggaacagcaggatcagccacacgtatggcatggcgatcaccagcttgcggccgtgcttcatctgcatgcgcgtcagccagtgggcaaagccgcccggcttttcgacgcgggctggaggttcaagtgtactcattggccgctccttataccgtcagcacaacgcaactgtctgcatcccaacacaggcgcacttcgtcgccccaggtcggctgccccttgcggtagcgatgttcgttctgtaactgcgcgctgagcatctgcccgcttttcaggcgcacgtgatagatggagagatcgcccagataggcaatgtgcaccacttcgcccacggcaaagttatagccatcggcaggcgggtcttcacagagcatgatcttctccggacgcagcgcgacgtaaaccggcacgttatccaccaccgagttttccggatcgaccttaagcggatgctgcagccccggcgattcgatgaccagaccgtcttcctgacgatctttcagcagcccctcgaagacgttaaccgagccgatgaactccgcgctgtagcgggtggttgggtgctcataaatctcttccggctcgccaatctgcacgaacttcccgcggttcatgatggcgatacgtccggccatggtcatggcctcttcctggtcgtgggtgaccatcacgcaggtcacgcccacgcgctcgaggatatcgaccacttcaagctgcatacggtcgcgcagctttttatccagcgcgcccatcggctcatcaagcagcagcagtttcgggcgttttgccaggctgcgggccagggccacgcgctggcgctggccgccggagagctggtgcggcttacgcttcgcgaactcctgcatgtgcaccaggctcagcatctcggccacccgcgtggtaatttcagccttcggcagcttgtcctgcttcaggccaaaggcgatattctgctccaccgtcatatgcgggaacagcgcgtaggactggaacatcatgttgatcgggcgctgatacggcggcacgctggagaggtccacgccgtcgagcacgatctgcccggcggtgggctgttcaaaaccggccagcatacgcagcagggtcgatttaccacagccagaggcccccagaagggcaaaaatttcgcctttatagatcgtcaggctgacgtcgtccacggcatgctggccatcgaaagatttggtgaggttacgaatttcaagcagcggggtcagcgctttacggactttcgcctgcgggcgggggatcgcgtcattcacggggtgttctccggtagagatcaaatcatggtgcaggcgcaccagaacggtgcgcctgttgccgggggcgcttcgcttgcccggcctgtgacaaagggttatttaccgcttttcaccttggtccacgcgcgggtacgcacgcggtcaatttttggatcctggactttcagggtgaagagcttggcgaacacatccgctggcggatagatagccgggttattacggatttcttcgctcaccagcggcacggaggccttgttaccgttcgcgtagtaaacgtggtcgctgatgtgggcgataacctcaggacgcatcaggtagttgaggaactgatacgcttcgtctttgtttttggcgtcagccggcatcgcgaagacgtcgaagaaggccagcgccccctctttcggaatgaagtaggagacgttcacgccgtttttcgcttctttcgcgcggtttgccgcctgccatacgtcccctgcccagccgatcgcgacgcagatgtcgccgttcgccaggtcgttgatgtactgggacgagtggaagtaacgaatgtttggacggagcttcagcagcagatcggtcgccgggccggtgtaatcatcggccttattgctgttcggatctttgcccaggtagttcagcacggtcgcgaaaatctcttccggggcatcgaggaaggagacgccgcagcttttcagcttctcgaggttttccggcttcagcaccacgtcccagctgtccagcttcacgtccgggcccagcgcggctttgattttatccacgttgtagccgataccggtggtcgcccacaggtaaggcatcgcgtatttgttgtccgggtcgtgcttagccaccagcttcagcacttccggatcgagatttttccagttcggtaatttgctcttatccagcggctggaagacgcctgccgtcagctggcgctccaggaagcttgcggaaggcaccacgaggtcaaacccggtgctgcccgccatcagctttccttccagcacttcgttggaatcgaacacgtcgtagacgactttaatgccggtctctttttcaaaatttgccaccgtgtccggcgcaatatagtcagaccagttataaacgtgcagcgttttttgttccgcagcgagcgtgccggcagagacggccatcagagcacccgcaaccagacccgataaccattttttattcaaggcgatcatagtgttattccttctgaaagctcgttaacaaacgaactaaaactgtgcaatcaggatatatgcaaaaatcatgcatagtttgtcgctctgctcaaaataaaaagaaacctctttacccggcagcttccgctcgcttttttaagcatcgcaagaataactgtagcccgtgtccccggctatagcccagacgaaaaaacgccttttatcaattttttatgcaggttaagtctacgtgataagccgaaacggccttcagggaggtgaaatattctttaaagaaaggttaaaagcagcagaaaaaatggccttctgcagccgctatggcagcgactgcgcaaaagtcagacaggcttagtgaagaaaattgggagatgcatcattattctctgcatcatcttccgcgctatacagcagatggtgtgcattggcttccatcataaccatggaaatttgctcttcgctcaagcgcataaaccaggcgaactgcttgaacgacagccctgccccggagaataaagactggcaaacgaccagttttggcagattatcatcctgtatgtcgagaaatgccttcaccgtcaaagaactggcattgatggccgacaggtcggaagccagcgccagcagcgcggagggcttcacttcggccagcgcggagaaaaggatcacgtcgttaatcagatcgattttggcatcgaaaatgccgtcgaaattctgcatatgaggcagatgcagcgcctggcaggaatcacattcgaagaacgtaattccggcatcatcaagccattgacgtaacgtatccagtgtaggtacgacctgtaaatccatcgcgatgcagcctctttaataaaaacttcgcatagggtacttaaaaagcgcgcggtaatccatttaaccacccgttttcagacagtagcccggcgtcgcatgacgctcgatccataagatcattttacccgcaatatcgacccctgtggttttttccacaccttccagccccggcgaggcgttcacctccatgaccagcggcccgcgcgtcgcgcgcagcaggtctacacccgccacgtccagccccagggtttgcgccgctttcacggcaatttcccgttcgcgatcgctgatatcggcgattctggcaatgccgccgcggtgaaggttagagcggaaatcgccctctttggcctgccgctcgatcgccgctacgacctcgttacccaccacaaaacagcgaatatcgcgccctttcgcctcttcgatatactcctgcaccagaatgtgggcattgaggccccggaaggcatcaatcacgctctccgccgcctgacgggtctccgccagcaccacgccaatgccctgcgtgccttccaccagcttgatcaccaaaggcgcgccgcccaccatgtcgatcagatcgctggtgtcgtccggggaatgggcaatcccggtgacgggaagatcgatcccctgacgggcaagaagctgcagcgagcgcagcttgtcgcgggcgcgggaaatggcgacggattcgttgagcgggtagctgcccagcatctcgaactggcgcagcgcggcggtgccgtaataggtaatctgggagccgatgcggggaatcaccgcatcaaagtgcggcagcttgcggcctttgtagtgaatcgacgaggcggccggatcgatgttcatatagcaggacatcgggtcgagaatttcaacctgatgcccgcgtttcgccgccgcttctcgcaggcgcttacatgaatagagcgttccatcccgggacaatatggcaattttcaccctgcacctctctgaagacatggaaaaagcctgcgtatcatatacgcaggcaggcgcaggataaatggactatcgcgtcgcccagccctgtttgtgcaggtaatcaagaataaacgggcgattttctttaatgatggtgcggcgaatatggtcagtccaggtgtcgcggcggttattgctgccgcgcgtcatgtagtagttcgccagctcttcatcgtagtgattcaggacatcctgatcgaccggctggtagtggttttcatgcaccagcatcgccgcaggaatgcgcggcttcagatccgggttatccgccggccagccaaggcacaggccaaacagcggcagcacgtgttttggcagcttcagcaggtcggtcacgctttgaatgttgttacgcaggccgccaatgtagacgccgcctaaccccagcgactccgccgccgtaaaggcgttttgcgccatcagcgcggtatccaccacgcccagcagcagctgttcggccaggcccagctcggcctcagggcagatctgcaggtggcggttaaagtcggcgcagaatacccagaactcggcagcctgagccacatgcttctgcccgccggtcaacgtcaccagctgttcacgcatcgccgggtcggtaatgcggataatggagctgcactgcaggaagctggagctggaggtcgcccttgcgctgttaataatcgcttcgcgctgcgcatcggtaatcggctcatcggtgaagtggcgaatggaacgatgggaaaggagcaggtctatggttggcgtcatcttgtctctctttgtcttgcttaaaccgtatggcagccagtataggtaatgatatgcgcggtgtaattggcgaaacatagctcttagatattataacgacaggcgaaaccttctttaatgacgacaggttatggggcactatacgtgtcattcgccgtcaggcttgtttttttgaggagagagaaatgtttgcagttatttttggtcgtccagggtgcccttactgtgtgcgcgcgaaagagctggctgagaaactgaccgaagagcgcgatgacttcaacttccgctatgtggacatccacgcggaaggcatcaccaaagccgatctggaaaaaactgtcggtaagccggttgaaaccgtaccgcagatcttcctcgatcagaaacacattggcggctgcaccgactttgaagcttacgccaaagagcacctgggcctgtttgctgcccagtaatgaaatgaaaggacgccctcaccgagagggcgtttttatttgtggtgccgtcggttatgaagcagactgcgcacaaataagtagcagagcgcgccaagggcgcaccagaaaacagcgctcatcaaccacgccagctcctgccagaaactccgcgtagagatatacagcaagcgcatcatcagcaaacagagcggcgcggccagcatggcgcccagcagtggcttcaccacctccccttttcgggagagaaaactggcagctgcccccggcagggtaaaaaagagcaacccgagctccggatgacccgacgccctgaatgcccctttcacgttaaaagcaagcgacatgcatacgaccgtgaacagcaaaaagcagctgatcacccccgcccagtttcgtttcatattcaacctatcctcctgacttatctctatcaaatacactttcgtcgggtagacgcccagtcagataaagcaatgcggcaatccttgccaaagtacgcacagggtgatgcgataatcagtagctgtcagtagctaatgcgattaaactacacgccagctaatgttttagggaataaagcaggaaacagggagcgttaacgcttttccctgacccaaaaaacagtagcccaaaaagtcctttcattcaacaacttactggtaaacaagaagttagcctccgtgaatataaacgtcgcagacttgttaaatgggaattacatcctgttattatttgtggtactggcgctgggtctttgcctgggtaaattgcgcctgggttcggttcaactcggtaattccattggcgttttagtcgtctccttattattagggcagcagcacttcagcattaacacggacgcgctcaacttaggttttatgctgtttattttttgtgttggcgtggaagcggggccgaactttttttctattttcttccgcgacggcaaaaattatctgatgctggcgctggtgatggtcggcagcgcgctgctgatcgcgttagggctgggtaaactgtttggctgggatatcgggctaacggccggtatgctggcaggttcgatgacctccacgccggtgctggtgggtgccggtgataccctgcgccactccgggatggccggggaacagctctccaccgccctcgaccacctgagcctgggctatgccctgacctatctgattggtctggtaagcctgatcgttggcgcacgctacctcccaaaactgcagcatcaggatttgcagaccagcgcccagcaaatcgcccgcgagcgtggtctggataccgactccaaacgtaaagtttatctcccggtgatccgcgcctaccgagtcgggccagagctggtggcatgggcagacggcaaaaacctgcgcgagctggggatttaccgccagacgggctgctacatcgaacgtatccgccgcaacggcattctggcgaacccggacggcgacgcggtgctgcagatgggcgacgacatcgcgctggtgggttacccggacgcccacgcccgtctcgacccgagcttccgtaacggcaaagaggtgttcgaccgcgacctgctcgacatgcgcatcgtcaccgaagagatcgtggtgaaaaaccataacgccgtgggccgccgcctggcgcagctgaagctgaccgaccacggctgcttcctcaaccgcgtgatccgcagccagattgagatgccaatcgacgacaacgtggtgctcaacaaaggcgacgtgctgcaggtcagcggcgacgcccgccgcgtgaaaaccgtggccgaccgcatcggctttatctcgattcacagccaggtcaccgatctgctggccttctgcgccttctttatcgttggcctgatgatcgggatgatcaccttccagttcagcaactttagcttcggcatcggtaacgccgccgggctgctgttcgccgggatcatgctgggcttcctgcgagcgaaccacccgaccttcggctacattccgcagggcgcgctgaacatggtgaaagagttcggtctgatggtctttatggcgggcgtgggcttaagcgcgggcagcggcattggccacagcctgggtgccgttggctggcagatgttggtttccggacttatcgtcagcctggtgccggtggtgatctgcttcctgttcggcgcctacgtgctgcgcatgaaccgcgccctgctcttcggggcgatgatgggggcgcgtacctgtgcgcctgctatggaaatcatcagcgacaccgcgcgcagcaacatcccggcgctggggtatgcgggcacctatgctatcgctaacgtgctgctgacgctggcgggtacgctgattatcatcatctggccggggctcggataactcctaagaatgcgcgtggcggaaaatattttcgttacgcgcagaacttttttatcagggggcagtcataactagtgccactgcttttctttgatgtccccaatttgtggagcccatcaaccccgccgttttggttcaaggttgatgggttttttgttgcctgaaattccccaccttctaatattttcttctcgcccgccaccaaaacatatatgattaaacgtatataaaaatcacatctgcaggaacacccatgctccacccactccacctcttcaaaaccctctccgacgaaacgcggctcgccatcgtcatgctgctccgcgaagcgggcgagctgtgcgtctgcgatctctgcgccgccaccgccgaatctcagccgaaggtttcccgccatatggcgctgctgcgcgagtccgggctggtgatcgaccgtcgcgagggtaagtgggtccattaccgtctctctcccaacatgcctgcatgggcggcagccgttatcgacaccagttggaactgcctgcgggaagagacgcgaatgaagctgaaaaaccggcttccgggttcgtgctaatcaaaacacattcacaaaaacagatataacggagtaagcgatgtttctggcaggggcaatttttctgtttacgctggtgctggtcatctggcagcccaaaggactgagtatcggctggagcgcgactattggcgccgtgctggcgctggccagcggcgtgattcacattaacgatattccggtagtctggaatatcgtctggaacgccacggcaacgtttatcgccgtcatcattatcagtctgctgctggatgagtccggctttttcgagtgggcagcgctgcacgtcgctcgctgggggaaaggtcgagggcgattgctgtttacctggattatcctgctgggcgcagccgtcgcagcgctgtttgctaatgacggcgcggcgctgatcctcacgcctatcgttatcgccatgctgctggcgctggggttcagcaaacaggccacgctggcgtttgtgatggcggcaggttttatcgccgataccgccagcctgccgctgattgtctccaacctggtcaacatcgtctccgcagacttcttcacgctggggttcagcgaatacgcttcagtgatgattccggtggatatcgccgcgattgccgcaacgctggtgatgctgcacctgttctttcgcaaggaaattcctccagaatatgacctggcgaaactccaggagcctgcgcgggccattcacgacctcccgacgttcagaacgggctggatcgtcctcctccttctgctcgtcggtttcttcgtgcttgaacctctcggcattccggtcagcgccattgcgaccgtcggcgcgctgattttattcgctgtcgcaaaacgcggacatgcgataaataccggaaaagtgctgcgcggcgcgccgtggcagatcgtcatcttctcgctggggatgtatctggtggtgtatggcctgcgtaatgccgggctgacggactctctcacaggcgtactgaatagcctggccggacacgggctgtgggccaccacgctgggaaccgggttcatcaccgcgttcctgtcatccataatgaacaatatgcccacggtgctgattggcgcgctctccattgacggcagcacggcaacaggattgataaaggacgcgatgatttacgccaacgtgattggctgcgatctggggccaaaaatcacgcctattggtagtctcgccaccctgctctggcttcacgtgctggcgcagaaaaacatgacgattacctggggcggctatttccggacgggcatcatcatgacgctgccggtcctgtttgtgacgctcgccgccctggcgctacgtctctccttcacactgtaatgagccactgatatgagccacatcaccatttaccacaaccccgcctgcggcacctcgcgcaacacgctggagatgatccgcaacagcggcgcggagccagagattattctctatctggaaacgccaccgtcgcgcgatacgctgaccgccctgattgccgatatgggcatttcggtgcgcgatttgctgcgtaaaaacgtggagccctatgaacagctcggccttgccgacgataagttcaccgacgaccagcttatcgattttatgctgcaacacccgattctgattaaccgtccgatcgtggtgacgccgctgggcacccgcctgtgccgcccgtctgaagtcgtcctcgacattctgccggacgcgcagaaaggggcgtttacgaaagaggatggcgaagcggtggtggacgccagcgggaagaatatcctgaaaaaataatccttcctcaggtggacgacagggccagcgcccggcgggccctgaacgcctggagaaaacaaccgcccgctagctcgccacgcagacccggttgcgcccctcacgttttgcacgataaagctcacgatcggctcgcgccagggctgactgcacgccatgttcaatctccagttcatccggcgtcatgcatacgagccccatgctggcggtgaagcggatcgtctgcccgttgaagtcgacgttctggctggcaaggctcatccgtacgcgctcggcgatctcagcggccgtctccagagaggtctgcggcattgccacgacaaactcttccccgccgaagcgggcgacaatgtcgctgcctctcaccagtgccggaagcgcgttgccaatatgcttcagcaccgcatcgccgccgtcatggccccaggtgtcgttaatacgcttgaagaaatccagatccatgctcatcaggcacaggggctgctgatgccgacgggcaagattgcaggcccgcaaagaccactcatcaaactggcgacggtttgccagcccggtgagcggatcgagccgcgcctcctgctggaaacgcgcccgctgcagggcgttgacgtggatgtaatgcatcagaaaccactgcgtaatggagataaccagaatcgccagcgccgtccacagagcctgataataccagccgtgcagcacgtcttttctggccagcccgacggccagcccccatttgcgttcgttgaggttaagaaatacacccatacgttcaacgccatcaatcggagaggtatatcgttggacctgtgcggtatcgcttgcgtattccagcagcttcgcgaggcgcgggtcggaggtgttcaattgcgaaccgtcattcgcccccatacgggcaagctgcaccgcattgtcacggtcaaggaccgccatcgccccaccctgacctaaatcgaagccctgcacttccattttgcgaaacatatcgttcatggtgttaccattgaagaaacccaacgcaccaccaagaaagcgaccatgtgcgtcgcgcactgcacggaacatcacgaagcccaacatgtttttatccgtgccgttgctctgccagtaaaacaaactttcggtaacttcatcccggcgaaaatcggtaaacagagggtgctgccgaaagctggcctgcgcaagcgtagaggcgtccagagcgcgctcaaaaggaaatagcgcgcggctgctgagaaaatcaccgtcttcatcaaagacgataacgccatccagccaggcgcgcttgagctccccttgcaggaatggctgcgcgttttcaggcgtgaccgtatggttgagcagaaaggcattcccgataaagcgcatctggtagcgcatcgcgttaaggctggtatcaaactgctgggactggagtatggccgtattgcgaaggatacgtgcggcgttatcctccacatagccgcgctggtagagcagatgcccaatcagcagactcgcctgaaccaaaatcaacagtactaacaacgctctcttttttgccagactgacctgcacgaaccaggtacttactttttcacccaacgccaaccactgaacagtaaataaccaccgcggtggatagtcacgtgatcggtccggattgtcaatatggagaaaaatcgtaatacattgaaaaatatgaactaattttctttatttaacggtgtaatgcccgcaatcctccccaccatcgcccgaatctcctcccggcttaacggcgcccggtcggtgacatagtgcagcgtcatcccttcgataaacgcgtccagcgcgcgggtggtgaccgggtcgaaccactgctccagcgtggtctggctcatcttcatccagtcctgcatcaccgttttgagcgccgcgctgcggtgcataaaggcgtagagctgatacatcagcgccatgttgtgcggcgtggtcacctgcgagctgtggatcagcgtggtgatggattcgcacgccatttccggcccggtgacgcccgcgaagaaatcccggtactgctgcgacatctggcgggtaaaccacgtgaaggcctcctccagcagcggctccatgccgtcgaaatagtaggtcatcgaccccagcggcacgcccgcgcaggtggcgattttacggtgcgtgacggcgtgaataccgtgttcagcaatggtgtcgagcgtcgcctgcaggatcttctcccggcgatgcggatcgttgggtggtctgctcatcaattcctcacctggtttgtgtacaaatgtacacaaacttgctagtgttgtcgctattgttgtacttctggtgctatcccgatgacgctgacctctccccgaaaagccctgcagctccgcctgtgggcgctgtttatgttcttcttcattcccggtctgctgatggcttcctgggccacgcgcacgcccgccattcgcgatattttgtccgtctctaccgcggaaatgggcatcgtgctgttcggcctgtcgataggctccatgagcggcattctctgctcagcgtggctggtaaagcgcttcggtacgcgagcggtgatccgcaccaccatgtgcttcgcggtgttcgggatgatggtgctgagcgcggcgctgtggtttgcctcaccggtgctgtttgccctcgggctgacggtgtttggcggcagcttcggctcggcggaagtggcgataaatgtggaaggggcagcggtcgaacgcgagatgaacaaaaccgtgctgccaatgatgcacggcttctatagcctcggcacgctggccggtgcgggcgtggggatggcgctgacggccactggcgtgagcgcgaatctgcatattctgctggcggcgctggtgtgcatcattcccattctgaccggcatccgggccatcccggacggcaccggtaaaaactccgctgacgaacagcactcagccgaaaaagggccgcccttctaccgcgatttccagctgatgctgatcggcgtggtggtgctggcgatggcgttcgcggaggggtccgccaacgactggctgccgctgctgatggtagacggtcacggctttagcccgacctccggctcgctggtttacgccgggtttacgctggggatgaccgtcgggcgcttcaccggcggctggtttatcgaccgctacagccgcgtggcggtagtgcgcgccagcgccctgctcggcgggctgggtatcgcgatgatcgtctttgtggatgtagactggattgccggcgtctcggtgatcctctgggggctgggcgcgtccctcggcttcccgctgaccatctctgccgccagcgataccggcccggatgccccgacgcgcgtcagcgtggtggcaaccacgggctatctcgccttcctggtcgggccgccgctgctcggcttcctcggggagcactacgggctgcgcagcgccatgctggtggtgttagggttggtcatcatcgcggcgctggtggcgcgcgcggtggcaaagccggaaacgaatcaatcgacactggagaaaggatatgagcgttaaactgatcgccgtcgacatggatggcacattcctgagcgatgccaagacctacaatcgcccgcgctttctggcgcagtacgcgcgcatgaaggcgcaaggcattcgtttcgtggtcgccagcggcaaccagtactaccagctcatctcctttttcccggagattgcgcatgaaatttcattcgtcgccgaaaacggcggctgggtcgtgagtgagggtgaagacgtcttcaacggtgaactgtcgaaagcccatttcgagaccgtcgcgagcgtcttaaacgacgttcccggcattgagattatcgcctgcgggaagagcagcgcctatacgctgaagtgctatgacgaggcctttaaggccatcgcggcgaagtattatcaccgtctggaaatggtcagcgatttcgacaacctgaacgatattttcttcaagttcggactcaacgtgtccgatgatgaaattccgcgtattcaggcgctgctgcatgaaaagctcagcgacatcatggtgcccgtcaccaccggtcacggcagtatcgacctcattatccccggcgtgcataaggccaacggcctgcggatcctgcaacagcgctgggggatagagagcagcgacgtggtggccttcggcgacagcggcaacgacgtggagatgctgcgccagtccgggttcagctttgcgatggcaaatgccagaccgcatatcaaagcggcagcgcgttttgaagcaccgcataataacgatgaaggcgtgctggatgtgattgagaaggtgttgaacggggaggcaccgtttaattgaccgcgtgcggtctggtgcccttaccctagccctctcccacagggagagggcataagaattaaggttgcagagcgtttccgacgcgcttgtctttcaggaataccaccatcaggccaacccacagcacgccattggcgaggttaaacaggctgaacagcccgttaccgcccatcgcgtaggcatgcttgctcacctcgataccgacggtaaaaatcagcatctgtagcatccccatcgccgcggagaccgtgcccttactcatctcgctggcaaacagcgtcaggcgcaccagcccggcgttcgccacgccaatcccgaaggcgtagatactcagccccgccgtcatccacaaataagcgtgagatgacgcgacggttgccaccgccgccagaatcagccctgccgcaatcggccagccgcccatgataatcagcgaacgcacggtgcggcgtgacgtcagacgcgccagcaccaggttaccgataatcagggcgccaaagatcggcacctgcagcaggccgtactcgtagctgctgagcttttcgccgctgatgataatgaccggagactgggcaatccacgccagcagcggcaggctaacaaacccggtcgccagcgcgcccgctacaaagcggccgtttttcagcacctctttgtaatcccgacccagctctttcagcgagagtttctcgccgatgcgggtggcggtttccggcatcgcacggtgcaggccaaagaacgcgatggcggcgagaacggcaaagagcacaaacatcccttcccagggggccatatgcacccatgcggcgcccaccagcggcccgagcaagggagcgatcagcgccacgttcgccatcagcgcggtgattttgatacacaccgcctcttcaaaagactcctgaatggccgcataccccacggcgccgataaagcacaggctcaccccctgcaggaaacgcagcagagtaaattgttcaatattttgcgccagcagcgtggcaaggcaggtgacgatgaaccacaccacgcccgtcagcatcaccgggcgacggccaatacgatccgacagcgggcctaacagccactgtaaaaacatgccgccggccagataggcggtcatggaggtcggtacccactcaattccggcgttgtactgcgccaccacggccagcataccgggctggatcatatcgttgccgatataggtagaaaattcgtagagcaccagacacagggggaaaagcaacgcctgacgacccagacgtgaacctgaagaagaacggtttaacatgcaatctctttataatgacaaaatcgcgacgagtgtaatgaaatgccgcagcccgagatagtgatttatcgaggataaacagaaataaagcacatatcgtcttcgtttaaggtttccttaatttgacagatttatgatagccccattactcgtcaacgaccccaaattatgtctctcacctccagccgttcagaattgtctaagttacagacaaataagacaaaacgcctttaccgcttgccgtcccgcttttatggttatcagcttttcatactgatagtccttgccgtggtgttcacgtggctatcgcgcaatgaagcgctcgacagatggatcaccggcttctggtatgacgcggcgacgcagagcttcccgctgcagaaagaccacctgctggatctgctcaaccatcgtctggcgaagtacattgccatcgctttaggcgccgtggcgctgttttacggcgcgtacaagcgtaacgcgaggctggttacggcggcgctgctgatggggcttggcgcgctggtcgtgggcgtgctgaaaagcatgagccatcacagctgcccgtgggacctggtggaatatggcggtaaggcgatgtcctatcccctgttcagcgccgtcccggcggacagcggaccggggcgctgcttccccggcggccattcttccagcggctttatggtgatgggactgttttttgccttctggcgcgagcggccgcgtctggcctggagctttgtcgttctcggcattttgctgggtctggcgatgggcttcggtcaggtcatgcgcggggcgcattttttctctcacaacctgtgggccgggtggtgggtctggttttcccaggtggcagtctacgggctggtttccacccggtttgctaaagagtgataacgctatgctagagaatctgaattatcagctgttttatctgatcaacgccaccccggcctcgcccgagtggatgatcgacttcgccacctttctggcaaaagatctgatcagtatcgtgcccgcgctggcagccatcctctggctgtggggacctcgtagccaggtgaaagcgcagcgcaagcttgtaatcaaagtggcgatggctctcggcataagcgtcctggcaagttacattctgggccatgcgttcccgcacgatcgtccgtttgtcgatcacgtcggctataccttcctgcaccatgcgccggatgactctttcccgagcgatcacggtacggtgatcttcaccttcgcactggccttcctgttctggcatcgcctgtggtcgggtgcggtgctgatggtggtcgctgtggccatcgcctggtctcgcgtgtatctgggcgtccactggccgctggatatggtgggcggcttcctggtggggctgattggctgcgtgagcgcggctatcctgtggagcctcatcggggaagcgctctaccgtgcgctttcttcactctatcgcgccattttcgccatcccgatccgcaaaggctggatacgtgactaaccccgacctgacaggttacacttgaacccccgccctgcgggggttcatttttttatgccgaggaactatggaaacacgtcgcgatgaccgcattgctcagctgctacaggcgctgaagcgcagcgataagctgcatcttaaggaagccgccaacctcctcggcgtctcggaaatgaccattcgtcgggatctgaacagcgagagcgcgcccgtcgtgctgctgggcggatacattgtgcttgagccgcgtagcgccagccattatctgatcagcgaccagaagacgcgcctggtggaagagaagcgcaaagccgcgcggcttgcggcttccctggtacagccgcaccagacgctgttttttgactgcggtaccaccacgccgtggattatcgaagccatcgacagcagcattccgtttaccgccgtctgttattccctgaacacctttctggcgcttcaggagaaacccgagtgccgggtgatcctctgcggcggtgagtttcacgccagcaacgcgatctttaagccgctcaacctgcaggacacgctcagcaacctctgcccggatatcgcgttttattctgccgcgggcgtcaatgtgcgtcagggggcaacctgctttaacctggaagaattaccggtcaagcactgggcgttaagcgccgcgcagtaccatgtgctggtggtcgatcacagtaagtttggtaaggtgcgtccggcaagaatgggcgagctggcgcagttcgatgccatcgtcagcgattgccgcccggacgacgagattgtggcccacgcgaaagcgcagcaggtgaagttgatgtattgaggttatgccgggtggcggcttcgccttacccggcctacaacggctcgaacgtaggccgggtaagcgcagcgccacccggcaaaaacttagctaaaccagctgccgaaccacccgtggaatttcatcatcacgaaatcccacatccggctgaagaagccgccctcttccactgcttccatcacaatcagcggacgctgttcaatcgacttaccgttaagctggaaatcaatcgtcccaaccacctggccttttttcagcggggcggtgagctgcgggtcggtcagagtgtagctggccttcaggtttttcagctggccgcgcggaatggttaccgagcccgcctcacccgcgcccaggttcacctcgctcttgtcaccaaaccagacgcgctggctgacgaacgtggcatccggtttaatcggcgtcacggtttcataaaagcggaagccccaggtcagcagtttttctgattcgttaaagcgaatgcggtcggttttggtgcccagcactaccgaaatcaggcgcatgtcgccctgggtcgcggaggctaccaggttatagcctgcacccgccgtggtgccggttttcatcccgtccacgttgacgttgctgctccacagcaggcggttgcggttcggctggcgaattttgttgaaggtaaactctttctctttgtggatggcgtattcatccggcacgtcgtggatcagcgctttccccagcagcgccatgtcgcgcgcggtgctgaactggcccggcgcatccaggccgtgaaccgttttgaacgtggtgttggttaagcccagcttctgcgcgtaaccattcatcaagccaatgaaagaatcctggctgccggcaacgtagtcggccagcgcgatgcacgcatcatttcctgactgaataatcacccctttattcagatcggaaacggagacctgatcccctggcttcaggaacatcacggaagatccgcgcagggccgggttgccggtcgcccaggcgtctttcccgatggtcaccatatcgtccagcttgatcttgcccgctttaagcgcctggcccaccacatagctggtcatgattttggtcaggcttgccggatcgagtttctcatccgcattcccttccgccagcactttaccgctggcgtagtccatcaggatccaggcgcgcgcatccacaggcggcgcttcgggcgcagcctgttcagctgcgtagagcgttggtgcaaacaggaaaagaagcgcagagcctgccgccaggctgcgcagagaagtcattttacgcgtcataaatgccacccgagtgtccattcaaaaattacgtcacatcaccgtgtcgcaagaagcgatgagtaatagcgcactaaaaccgttaaagaaacccaacgagggtaaagttattaaagtttatgcaataacattcagatacgctttgattaaggcgatttttttgtcttctgttgcgtaattgttaggtttatctcaccatggcgaaaagctgattcggattcacatctcattgggagtaaatatgattacgctgtggggcaggaataattccaccaacgttaagaaagtgctctggacgctggaagagctggatttaccgttcaatcaaatcatggcaggcatggcgttcggcgtgaacaaggaggccgactatctggccatgaacccgaatggcctggtgccgctgctgcgcgatgatgaaacggacgcgacgctttgggagtccaacacgattgtgcgttacctcgccgcccagtacggccagggccgcctgtgggtagaaaacccggcccgccgcgcccagggcgaaaagtggatggactgggcgaaccagacgctgtccccaacccaccgcgtgatcctgatggggcttatccgcacgccggaagcagaacgcgattatcccgcgattcacgccgcgcaggatgcctgcgaaaatctgtttgcgatgatggatgacgagctggcgaagcacgcctggttctccggcgaggcgttcggcaccggcgatatcgccgtggcgccattcgtctggaacctgaccaacatgggcctgaagtggacgccgcgcccgcacctggagcgctggcttaaacagctgagcgatcgcccggcgtaccgcaacgtcgtgatgatcccggttacctgattacgcgccggacgggctgactttcaacagctgcccgtccgtctcgtcggtcaggacatacagatacccatccggccccacccgcacatcccgaatacgctgatcccggtcgcccagaatgcgcccgtcctctgtcaccttgttaccctccacgctcagcacgatcacgtccttctccttcagcgcgccgataaacagcttgtttttccactgcgggaagacgtcgctgttgtagaacgccatgccgcttaccgcgggtgagactttccagacgaacagaggcttctcggtgccctcaacgtgctcgcctttggcttccgggattttcagaccgctgtagttaatgccgtgcgttgccagcggccagccgtagttcttacccttctccgggatattgatctcatccccgccgcgcgggccgtgctcgttcagccacagcgtgtcgctccaggggttcatcgccatcccctgcgggttgcggatgtcgtaagaccagatttcaggtcgcgcaccgggggtattcacaaaggggttatccggagggacttttccgtcttcggtgaggcgcaccactttgccctgcaatttatccagatcctgcgccgtgggacgctggttattctcgccgagtccgataaagagggagcctttgccgtcgaacaccagccgtccgccgaaatggttaccggttgagagtttcggcatctggcggaacgccacctggaatccctcgatgcgggaatagtcgtcgctcaggcggccaaagcccaccgccgttccggctttgccgtcatgcccggcctcggcgtagctcagccagacgcggcgcgacgtttcaaaatccggcgccagcaccacatccaacaatcctccctgcccgtttgcccagaccttcggtacgccgacaatcggatcggagagcccttttccggcctgccagcgtttgagctggccgcccttcagggtcaccagcagcccgttattatccggcaggaacgccagggaccaggggtgatcgagtctgttttgcagcacctcgaccttcaccgcctctggcgcagcaagaagtgaaaacggaatgaataacgcaggcagggaaatcagcgaggatcgaggcataatgcgctcctttatcggcatatggcctaaagattagccactgcgtccgggcgcgttaccacttttacaaaagcttaagcagaagggggagttgcctcccccgggatcagtgctgttcaagctgtttgtgctcgttcaggcacatgatgcatagagagagcgttgtcaggcagttttcaagcttctccgcgtttacggcgataaaattcgggcagtcgtggcgtccattcatcagacacacccctgcaatggagagcacctcggcggcgcggcgcagcgcgacttcttcactttcgccgtagttcgcctgcagggccggtgctttttcacgcatgaaattgcaaagttcaaacaggttatcacgcagatgttcgctttcgctgactgacatatacccttttgccttcctcaactgcaggtacgcggccaggtcgattcgggcgttgatcagcttgttcagcagatcgcgttttagtctgtcaacggtcatgctctttcctcctctgtcagccattgtgcatagtcaggataagtacattttttgtacagtttaatgcctggaatcaatttttattaactgattaacattatttacaatgttacaacctctgcccggcgcatccaccttgcaaagagtgtataaatcccccgcgatacgctgtaaaatcccgccctgataactccataattgatgaatttttaacctatgagcaatgttacgcaccagccgaaaatcggcttcgtctccctgggctgcccgaaaaacctggtggattcagaacgcatcctgaccgaactgcgcaccgagggctatgacgtggtgccaagctacgacaacgccgatatggtgatcgttaacacctgcgggtttatcgacagcgcggtccaggaatcactggaagccatcggtgaagcgctgaccgaaaacggcaaagtgatcgtgaccggctgtctgggcgcgaaagaagaccagatccgcgaagtgcacccgaaggtgctggagattaccggcccgcacagctatgagcaggtgctgcaacatgttcatcactacgtgccaaaacccaagcacaacccgttcctgagcctggtgccggaacagggcgtgaagctgacgccgcgccactacgcgtacctgaaaatttccgaaggctgcaaccaccgctgcaccttctgcatcatcccgtccatgcgtggcgatctggtgagccgtccaatcggcgaagtgctggcggaagccaaacgtctggccgatgcgggcgtgaaggaactgctggtcatctcccaggacacctcagcttatggcgtggacgttaagcaccgctccggtttccacaacggcgagccggtgaaaaccagcatggtgggcctgtgcgagcagctgtccaaactcggtatctggacgcgtctgcactacgtttacccgtacccgcacgttgacgacgtgatcccactgatggcggaaggcaaaattctgccgtacctggacatcccgctgcagcatgccagcccgcgtatcctgaagctgatgaagcgcccgggctccgttgaccgccagctggcgcgcatcaaacagtggcgtgagatctgcccggatctgaccctgcgctccaccttcatcgtcggcttcccgggtgaaaccgaagaagacttccagatgctgctcgacttcctgaaagaagcgcgtctggaccgcgtcggctgcttcaagtacagcccggtagaaggcgcaaccgccaacgagctggcggatcaggtgccggaagaggtgaaagaggagcgctggaaccgcttcatgcagcttcagcagcagatttctgccgagcgtctgcaggagaaagtgggccgcgagatcatggttatcatcgacgaagtggacgaagaaggcgcgattggccgcagcatggcggacgcccctgaaatcgacggtgcggtgtacctgaatggcgaaaccaacgttaagccgggtgatattattcgcgtgaaggttgaaaacgcggatgagtatgacctgtggggtagccgggtttaatctccccactccgcttttgtaggccgggtaaggcgtagccgccacccggcacatttcactgcactacccctttatcctcggatccagcgcgtcgcgcagcccatcccccagcaggttaaacgccagcacggtcaggaaaatcgccaggctcgggaaaatcgccacgtgcggcgcaatcaccatatcggccctcgcctcgttcagcatcgcgccccactccggcgtcggaggctgtgcccctaaccccagaaacgacaggctggccgccgagattatcgacacgccgatacgcatggtgaagtagaccacgatggacgacaccgtccccggcagaatatggctgaagaggatggtcgcatcgctggcccccatactgcgggccgactcgatgaaggtctgctgtttcagcaccagcgtgttgccgcgcaccaggcgggcaaaggccggaatcgaaaacaccgcgaccgcaatgatgacgttggccatgccgctgcccatgatcgccaccacggcaatcgccagcagaatgccggggaaggcaaacagcacgtcgcagatgcgcatgatgatgcggtcccaccagccttcgtaatagccggcgaccagccccagcacgatcccaatggccgcgccgatcagcaccgcaaacaccccggcggcgagcgagatctgcgcccccaccagcacccggctaaagatatcccgcccgagagagtccacgccgaaccagtggagcattgagggcccgtcgttcaggcggtcgtagtcaaaatagttttccgcatcaaacggcgccacccacggcgccacgatcgccaccacgatcagcagcagcacgaacagccccgcggtcatcgcgaccggctgacggcgaaagcgccgccagaattcagaccacggggtgcggatgaggtccggttttagccccggcatggcgtttaatacggcctgacgccgccagttcaacaatcgcatcttacttatacctgatggccgggttaatggcggcgtagagcacgtccaccacgaggttgataagaataaactccagcgagaaaagcaggacttccgcctgaatcaccggatagtcgcgcatctcgacggaatcgaccagcagacgtcctagccccggccagttgaagaccttttccaccacgatagagccgcccagcaggaagccaaactgcagccccatcatcgtcacgaccgggatcatcgcattgcggaacccgtgcttgaggatgacccacttctcgctgacccctttcgcccgcgcggtgcgaatataatcttcgctcagcacgtcaacgaacgaggcgcgggtaaagcgggccatcaccgccgacacggcagcccccagcgtcatcgagggcagaatgtaatgcttccaggtatcggccccgacggtgggcagccagcccagctcaacggagaagatctgcatcagcagcatccccagcgcgaacgccgggaaggagatgccggtcaccgccagcgccatgccgagcttgtccggccagcggttgcgccagacggccgccacaatcccggcgccaagtccgaacaccaccgcccagctcatgctggctatcgttaaccagaacgtgggcataaagcggctggcgatctcctccgacaccggacgacgcgacaccatcgagataccaaaatcaccctgaagaacgttgccaatatagtgcagaaactgcatatacagcggctggtcaagacccagctgtttacgcaccagctcaatgaccgtggcatccgcttcgggcccggcaaccagacgcgccggatcgcccggcagcatatggacaaacaaaaacaccagcaccgccacaataagcagcgtcgggataagccccagcaggcgtttgcaaacatagttcagcatgggcgttattttaaatccgcatcgtcaaagctaaagcccgtatccggcatgatgtagaacccggtcaacgctttgttatgggctgacaccagtttctccaccaccagcggcacccacggcgactctttccagatgatgtcctgcgcgtccttgtagagacgcgctttctcctccggtttggtggttttcagcgcgtcggccaggtctttgtccacctgcggattgctgtaaaacgcggtattgaatagggttggcggccagttctgtgaagcaaacagcggcgacagcgcccagtcggcttcacccgtcgaggccgaccagccggtgtagaacatccgcacgccgctctctttctgccctttcccctcgacctctgccgcacgctgtccggcatccatggcggtaacctgcgccttaatccccacctgcgccagctgctgctgggtaaactgcagcaccttctgggcggtactgtggttatgcgacgaccacagcgtggtgctaaagccgttcggatagcccgcctccttcagcagctcgcgcgctttggccggatcgtacggccacggctgatagctttgcgcatacgcaatagccggcggcagcacgccggtggccggggtggcatagcccgcaaaagcgaccttcaccagcgcctggcggttaatggcatagttaatggcttcgcgcaccttcggattatcgaacggcttttgcgtgacgttcatgctgatgtagcgctgcatgattgacgggctggcgaccagctccagcttgctgtttttctccagaatggcggcctgctcgtacgggaccgggaaggcaaactgcgcctcgccggtttgcagcatcgccgcacgggtgttgttatccactacaggacgccaggtgatggtatccagcttcggcagccctttctgccagtatcccgcgaatttcttcaccttcacaaaatcggtctggttccaggtgaccagctcgtacgggccggtacccaccgggtggaagccgatctccttgccgtatttcttcagcgcggcaggggaaatcatcgccgtcgccgggtgcgccaggatattgataaacgcggagaacggctctttcagggtgatttttaccgtcgccgggtcgaccacctcagttttggcgatgtttttatagaggttataacgcttgaggctgttctcaggattgctggcgcgatccaggtttaccttcaccgcgtccgcattaaagtcggtgccgtcctggaacttcaccccggttttgagcttaatggtgtacaccagcccgtcatccgaaacggtgtacccctccgccagcacgtttttaagcttcatctctttatccaggccaaacaggccctggtagaacgatttcgccaccgcctgggagagcgtgtcgttagcgtcatacggatccagcgtggtgaaattagagccgacggcaaccaccacatctttggcagcgaacgcgggggcagcggccagggctgccgtcacgctcgcggctaacaaccatctacgcgctacaaatgtaaccattatgttctcctgcctgttgaaagttataaccgcgaaaaggcattgtcctgacgcgggggagccacgaaatgacccggaccgacctcacgcagcgccacgcgctccacggcctcgccgcgtttacgaatattgatcggcatttcatcctgcagcagcacgcgctggccgtgacgatgcgccggatcggcgaccgggaccgccgcgatgagcttgcgggtgtacgggtgctgcgggttctcaaataccgcccttcgcggcccgatttccacgatttgccccataaacatcaccgccacgcgatggctgatgcgctcaaccaccgccatgtcgtgcgagataaacagaaaggcgatccccatatcccgctgtaaatccagcagcagattgatgatttgcgcccggatagagacatccagcgccgagacggattcatccgcaatcaccactttcgggttcagcgccagcgcgcgggcgatgcagatacgctgccgctgcccgccggaaaactcgtgcggataacgccaggcgtgttccggcttcaggccaacgcgctccagcagccaggccacgcgacgctgcactgcctcgccgtcgagcaggttatgcacccgcagcggctccatgatcgaataccccaccgtatgtcgcggatcgagagaggcatacggatcctggaaaataaactgaatatcccgccgcaccgcctgcagcctgctgtcaggaagggtatcaatgcgctcgccgttaaaggtaatgctgccctcctgcgcgtccaccagacggagcaacgcgcgcccggtcgtggatttaccgcagccggactcccctaccagcgccagcgtttcgcccggccagaggtcgaagctgacgttttccaccgcgtgcacttcgcgctttacgcggttcagtacgccgctgcgcagcggaaaacgcgtgaccagattgcgcacttccagaatgggcttgcccggcaccacggtgtcctgctcgcgttcctcctcctgcggctcagacgcctccagggaaatcaacggaaaacgacgcggcagatcgctgccgttcatcgcccccaggcgcggaaccgccgccagcagcgctttggtgtaaggatgcgcgggcgcgtgaaaaatctgctcgaccgggccggtttccaccgcgctgcccttgtgcatcaccagcacccgatcggcgatatcggcgaccacgcccatatcgtgggtgatgaaaatcacccccatctccatctcctgctgcagcaccttgatgagctgcaggatctgcgcctgaatcgtcacgtccagcgccgtcgtcggttcatcggcaatcagcaccgccggacggcaggagagcgccatggcaatcatcacccgctggcgcatgccgccggaaagctgatgcgggtagcggctcaggatggcctgcgcctccggaatgcgcaccagctccagcatgcgtctggcctccctgagcgcttcatcaccgcttagcccctgatgcaggcggatggactcggcaatttgttccccgaccgggaacaccgggttcagggaggtcatcggctcctgaaagatcatcgcaatgtccgccccgcgcacgccctgcatctgcgcgccgctcagctcgtttaaatcaatgacctgacggttacggcggcgcagcagcattttctcgctgctgatttgcccgcccgtctgttccagcaggcgcatcagcgccagcgcggtgaccgatttcccggagccggattcgccaacaatcgccagcgtctcgccgcgcctgagcgaaaacgataaattctgtactgcggggatgaactgccgctcttcctgaaacgcaatattcagctgatggacagccagcacttcgcggttgtccagctcttcactgtgcggcacgcgctgcccccttattcacgatagatccccgtgctcggctcatcaccggcatagccccaggcgcggtacatcccttcgctgttgaacggcagggccacgttgccctcgcgatccactgcaatcagcccgccgacgccgcccagggcaggcagtttctccatcactacgcgctcgcaggcttcgctcaggcttaagccgccgtaatccatcagcgcggtaatgtcgtaggccgcgagggcacgaataaacacttccccggtgccggtacacgacaccgccgccgtggcgttattggcatagcagcccgcgccgggcagcgggctgtcgcccacgcgtccggggagcttgttggtcatcccgcccgtggaggttgccgccgcgaggttgcccgctttgtcgagcgccaccgcgccgaccgtgcccattttgctgcgctcatccagcggcgcagtatggtcaagctgcgtcatgcccgccgaacgggcgtccagcagctgctgatagcgcgcctctgtggaaaacagatcgggcgataccggcgccattccgtgttcgaaggcaaacctctctgcccccgcgcccgtcagcagcacgtgcgggctctcttccatcaccagacgcgcggccagcaccgggttacgcaggtggctgacgcctgccacggcccccgctttcagggagataccgtccatgacgcaggcatccagctcgtgggtttcatcccgggtaaagaccgaacctatccccgcattaaataacgggcactcctccagcaggcgtaccgcctcggtgaccacgtccagcgcgctctcgcccgcttccagcattttctggcccgtttcgacaatggcgtacagcgcgtcgatgtagcgcttttcctgctcaggagtgagctgtgcacgggtgattgccccggccccgccatgaattgcgattaccgccttaaccattcgcatcacccgttagcctgttttgcggctttttctataaatatcattatcgtcgacgaaacttcagatgatttttgaatatagaaagacgtaacagtgatgtaaagcgtacaccctccggtcatacagttagccgcacttttctgccataatggacgctttcgttgttactccgcaggagcccaccatggattttaccgccggactgatgccgcttgagacggcactcacgcagatgcttgaccgagtttccccgctgcatgacgttgagacgcttcccctcgtgcgctgttttggccgtattgccgcacgcgatatcgtctccccgctcaacgtgccggggtttgataactccgcgatggacggttacgcggtacgcctggcggatctccagacgggtaacgccctgccggtggcgggtaaagcctttgcgggtcagccgtttagcggggaatggcctgcgggcacctgcgtgcgcatcatgaccggtgcgccggttccggctggctgcgacgctgtcgtcatgcaggaagagaccgaacagaccgacgacggggtgcgttttaccgccagcgtcaaagcgggccagaacatccgccgtaccggcgaggacatcaccctcggcgcgaccgtttttgccgccgggcaaaggctgacggtggcggagctgccggtgctggcgtcgctcggcgttgctgaaatcgacgtaatccgtaaagtgcgcgtcgccgttttctccaccggagacgaactgcagcttcccggccagccgctgcaggacggccagatttacgacaccaaccgcctggcggtacacctgatgctggagcagctgggctgcgaggtgattaacctcggcattattcctgacgatccggaaaaactgcgcgcggcgtttatcgaggcggataaatccgccgacgtggtcatcagctccggcggcgtctccgtgggcgaagcggattacaccaaaaccctgcttgaagagctgggcgaaatcgccttctggaagctggcgatcaagccgggcaagccgttcgcgtttggcaagcttccacacagctggttctgcggcctgccgggcaacccggtctcggcggcacttaccttctaccagctggcgatcccgctgctggcgaagctttccggcaacaaggccagcccgctgccggaacgcctgcgcgtgcgtgctgcgacgcggttgaaaaaatcaccgggccgtctcgatttccagcgcggcattctggcgcgcggcgcggacggcgagctcgaagtgagcaccaccggacatcagggctcgcacattttcagctccttcagtctgggcaactgcttcatcatgctggagcgcgagcgcggcaacgtggaagccggcgaatgggttgaggttgagcgctttaaccacctgttcggaggctgacatgacggtggagctgagcgacccggagatgatgcgctacaaccgccagattgtgctgcgcgggtttgatttcgaaggtcaggaagcgctcaaggcggccagcgtgctggtcgtcgggctgggcgggctgggctgcgccgccgcgcagtaccttgccgcggcgggcgtaggaagcatgacgctgctggatttcgataccgtgtcggtgtccaacctgcagcgccagacgctgcacagcgacgcgacggtgggccagccgaaagtggaatccgccagagcggcgctggcgcgtatcaacccccacgttcagttcacgctgattgacgcaatgctggatgacgacgcgctctccgcgcagattgcccggcacgatctggtcctggactgcacggataacgtcaccgtccgtaatcagctcaacgcgggctgttttgctcataaaacgccgctggtttccggggcggcgatccgcatggaggggcaaatcagtgtcttcacgtacgccgagggtgaaccctgctaccgctgcctgagccgtctgtttggcgagaatgcgctgacctgcgttgaggcgggcgtgatggcgccgctcgtcggcgtgattggttcattgcaggcaatggaagcgatcaaggtgctggcgaattacggcacgccggcagcggggaaaatcgtgatgtatgacgcgatgacctgccagttccgcgagatgaagctgatgcgtaacccggggtgtgaggtgtgtagtcagtaaaaagtcgggtggcggcttcgccttacccgacctacaacggctcgaacgtaggccgggtaagcgtcagcgccacccggcagccgcgtcagatggacgtccgtccaaacgccccctgccagtcctgctcaaacttcacaatcgctgcgtctaccgccggagaggtaataaactgctgcgccacgtccagcggcagcgtgatggactcgcagcctgccagcaggcagtccagcgcctgacgcggggttttaaagctcgcggccagcacttttgactgcggcgcatgcagcgtcagcagctgctgtaattccaccacggtctggatcccgtccccgccctgcgcgtccacgcggttaacgtaaggggccacatactccgcccccgccagcgcggacagcatcccctgcgcggcaccgtagaccgccgtgcccagcgtcgggatcccttccgctttcagcatcttaatagccgccagcccttccgcggtcaccggcaccttcaccaccagatcgttaatgatggcgcgcagcttgcgcgcgtcttccaccatcccttcggcggtggttgccattacctgcgcaaacagacggcccttgccgcccagcgcgtcgtgcagcgcgggcagcagttcgtcgagcggcgttttaccggccgccacaatgcttgggttggtggtcacgcccgccagcgggaagatacgcgccagctttttgactgccgcaacgtcagatgtgtcgagataaagttccatgatgtcaccctcaaaattagcctgcacttaccctatcacgacaaaacctgctcaagagttgacctgcatcaagataactttcattcgaaagtaatttaatcttcatatgcaagatgagaggcgaaaaacatgatcttcaatattcagcgttactctacccacgacggccccggtatccgtaccgtggtgttcctgaaaggctgctcgctgggctgtcgctggtgccagaacccggaaagccgctcccgcagccgggacgtgctgtttgatgcgcgtctgtgcctggacggctgcgacctgtgccagcaggcggcaccgggctgcatcgaacgcgcgctgaatggcctggtcatccaccgcgaaaagctgagtgaagagacgcttgatgccctcaccgactgctgcccgacgcaggcgctgaccgtttgcggcgaagaacagcaggtcgaggagatcatggcgaccgtactgcgcgataaacccttttacgaccgcagcggcggcgggatcaccctctccggcggcgaaccgtttatgaacccggagctggcgcacgcgctgtttaaagccagccacgaacagggtatccacaccgccgtcgagacctgccttcacgtgccgtggcactatatcgagccgtcattaccgtacgtcgatctgttcctcgccgacctgaagcatgtcgacggagacgtgttcaagcagtggacggacggttcggctaagcgcatcctggacaacctgaaacgcctggccgccgccgggaaaacgatcaccatccgcgtgccgctgatccagggcttcaacgcggatgaagcctccatcaccgccattaccaacttcgctgccgatgaactcggcgtcgacgatattcattttctgccgtatcacacgctgggcatgaacaaatacaccctgctcggccaaccctactctgcccctgacaaaccgctggataaccctgccctgctggacttcgcgcagcagtacgcctgccagaaagggttaaccgcgaccttacgaggataaacttatgaccaccctgaatctcaacaccctcagcgagcgcattaaggcgcacaaaacggccctggtgcatatcgtgaagccgccggtctgtaccgagcgcgcccagcattacaccgaaatgtaccagcagcacatggacaagccgatcccggtgcgccgcgccctggcgctggcgcatcacctggccaagcgtaccatctggatcaagcacgacgagctgatcatcgggaaccaggccagcgaagtgcgcgccgcgccgatcttcccggaatacaccgtctcctggattgagaaagagattgacgacctggcggaccgtccgggcgcgggctttgcggtgagcgaagagaacaagcgcgtgctgcatgaaatctgcccgtggtggcgcggccagacggtgcaggaccgctgctacggcatgttcaccgacgagcagaaaggcctgctggaaaccggcatcatcaaagccgaaggtaacatgacctccggcgacgcgcacctggcggtgaacttccctctggtgctggagaaaggtctcgacggcctgcgcgccaaagtggccgagcgccgctcgcgcatcaacctgacggtgctggaagacctgcacggcgaccagttcctgaaggcgatcgatatcgtgctggaagcggtgagcctgcacatcaaacgctttgccgacctggcgcgcgagatggcctccaccgaaacccgcgtaagccgccgcgacgagctgctggcaatggcggaaaactgtgacgtaatcgcccacgagccgccaaaaaccttctggcaggcgctgcagctgtgctacttcattcagttgatcctgcagattgagtccaacggccactccgtctccttcgcgcgtatggaccagtatctctatccgtactaccgccgcgacgtggagctgaaccagagcctggaccgcgagcacgccatcgagctgctgcacagctgctggctgaaattgctggaagtgaacaagatccgctccggctcgcactcgaaggcttccgccggtagcccgctgtaccagaacgtcaccatcggcggccagaagctggttaacggtgagccgatggacgcggtgaacccgctctcctacgcgattctggaatcctgcggccgtctgcgctccaaccagccgaacctgagcgtgcgctaccacgcgggcatgagcaacgacttcctcgacgcctgcgtgcaggtgatccgctgcggcttcgggatgcctgcgttcaacaacgatgaaatcgtcattccggaattcatcaagctcggcgttgaacgcgacgacgcctatgactacgcggccattggctgcatcgaaaccgcggtaggcggcaagtggggctatcgctgcaccggcatgagcttcatcaacttcgcccgcgtgatgctggccgcgctggaaggcggccgcgacgccaccagcggcaaggtgttcctgccgcaggagaaagccctctctgccggtaacttcgataacttcgacgaagtgatggcagcctgggatagccagatccgctactacacccgcaaatccatcgagattgagtacgtcgtggacaccatgctggaggagaacgtccacgacattctctgctcggcgctggtggacgactgcatcgagcgcgcgaaaagcatcaagcagggcggcgcgaagtatgactgggtgtccggcctgcaggtgggcatcgccaacctcggcaacagcctggcggcggtgaagaagctggtgttcgaacagggcgtcatcggccagcagcagctggcggcggcgctggccgatgatttcgacggactgacccacgagcagctgcgccagcgcctgatcaacggcgcgccgaagtacggcaacgacgacgacagcgtggatatgctgctgacccgcgcctatcagacctacattgaagagctgaagcagtaccataacccgcgctacggccgcggcccgattggcggtaactattacgcgggcacttcttccatctccgcgaacgtgccgtttggcgcggcgacgatggcgacgccggacggacgtaaggcgcacacgccgctggcggaaggggcaagcccggcttccggtaccgaccacctgggtccaacggcggtcatcggttccgtgggtaaactgcctaccgaggcgattctcggcggcgtgctgctgaaccagaagctgaacccgtcaacgctggaaaacgacagcgatcgccagaagctgatggtgctgctgcgcaccttcttcgaggtgcataagggctggcatatccagtacaacatcgtctcgcgcgaaacgctgctggaggctaagaaacacccggaccagtaccgcgacctggtagtgcgcgtcgcgggttactcggcgttcttcaccgccctgtcgccggatgcgcaggacgatattatcgcccgtactgagcatacgctgtaagaaaacgcccggtggcgctgcgcttaccaggcctacagagtctccccgtaggccgggtaaggcgaagccgctacccggctttctgactttcattcgaaattaaatttgtgctcctcgtcaccttgttattagaatgtttcaaaacgcagtgacccaggagcacagtatgaccgttaaagttatcgtcaccgatatggacggaactttccttgatgatgccaagcagtacgatcgtgaccgcttccaggcacagtttgaacagcttaaagcccgcgacattgaatttgttgtcgccagcggcaaccagtattaccagctcatctccttctttccggagcttaaagatcggatctctttcgtggcggaaaacggcgcgctggtgttcgatcgcggcgagcagatttttcacggcgagctgacccgccatgagtcgcagatcgtgattggcgaactgctgaaagacaaagggctgaacttcgtggcctgcgggctggagagcgcctacgtcagcgataaagcgccggacgcgttcgtggcgctaatgtcaaagcactaccaccgcttaaagcgcatcagcgattaccgcgacattgacgacgtgctgtttaagttctccctgaacctgccggacagcgacattcctaatctggtggataaactccacgtctccctggacggcatcatgaagccggtcaccagcggctttggctttgtcgatttgattatccccggcctgcacaaagcgaacggcatcagccgtctgctgaagcgctggaaaatttctccgcaagagtgcgtggcgattggcgacagcggcaacgatgccgagatgctgaagctggtaaaatattcctttgcgatgggcaacgcggcggaaagcatcaaagaaatcagccgctacagcaccgatgacaacaaccatcacggcgcgctgaacgtcattcaggccgtgctcgacaaccattccccgttcgacgcctgatcctcttctcgccggagccctgctccggcaccctcactcattttcccgtcctgtggcgcaggtcaagtttttaaacttgcattaacttatttttaacttaaagtatcacttgtagacacttttactttcgaatgaaagatgcgaggcagttatgacctttaccagtgaaaccttgccggcggatcacaaagcggcaatccgtcagttgaaacgtgagttacgcgcgcagatcggtgacgtgcaggcggtgttcaacaagctcagcgacagcattgccacccgcgtggcggaaattaacgcccttaaaaataaaggtgaatccgtctggccggtgattccgtttaacgatgtgaaaaacggcacgattaccgacgcacagcgcgaggccgtgaagcgccgcggctgcgcggtgattaaaggtcacttcccgcgcgagcaggcgctggcgtgggatcagtcgatgctcgactacctcgatctgaacaagtttgatgaggtgtacaaagggccaggcgataacttcttcggcaccctgaccgcttctcgtccggagatttacccgatctactggtcgcaggcgcaaatgcaggcgcgccagagcgaagaaatggcgcaggtgcagtcgttcctgaaccgcttatggacgttcgagagcaacggcaagcagtggttcgacccggacgtgagcgtgatttacccggatcgtatccgccgccgtccgccgggaaccacctcgaaagggctgggcgcgcataccgactccggcgcgctggagcgctggctgctgccggcataccagcaggttttcgcccgcgtgtttgacggcaacgtcgacaagtacgatccgtggaacgccgcgcaccgtaccgaagtggaagagtataccgtcgataacaccaccaaatgctcggtgttccgcaccttccagggctggacggcgctgtcggatatgatccccggccaggggcaggggctgctgcacgtagtgccgatcccggaagcaatggcgtacattctgctgcgtccgctgctggacgacgtgccggaagacgagctgtgcggcgtggcgcctggacgcgtgctgccggtttccgagaagtggcacccgctgcttatcgaggcgctgaccagcattcctgcgctggaggcgggtgattcggtgtggtggcactgcgatgtgatccactccgtcgcgccggtggaagatcagcagggctggggtaacgtgatgtacatccccgccgcaccgatgtgcgagaaaaacctcgcctatgcgaagaaggtcaaggaagcgctggaaaccggcgcgtcgccgggagacttcccgcgcgaggattatgaaaaaacctggcaggaccgctttaccgtgaacgatctcaacatccacggcaaacgcgcgctgggcatggtctagctgtcgtacagcccttcccgctccacggcggtgcgtcgtttcccctgacgtatccgccgtactgattcccgcacggccagcgtgccgttcagcagcaatgtgcccaccggcgcgtccgggcgcatgagccgctgctggagcatgtgtactgcttccgttcccagctcatcgcggggaacatgcacggccgttaatggaacatcctgaatcgccgccaggttaaagccgtcgatgctcatcaccgagacgtcctgcggcacgcgcaggccgtggttttgtaaggcgctgatggtgcccgccgccataaagtcgccgccaaccaggaacgccgtcggcaggtcttttccctgctgctgatttagccaatcgctcaccagctgctccgtctctctggcgctgaagctcggcaccaccagcagatcgcgcttgtcgttgaacgccaggttgtgggactgccacgcgtcgcggatccccgacaggcgcagctccatcgtgtagcgacgcaggcatagcacgttcatcacctcgcggtgtcccatctcgaacaggtattccgccgcccgctcgccgatggcgcggtgatccggggcgacggcaggcaggcgcatgcggcggtcccggcagttaatcagcatgcagggtttgcccacgtccaccgccagatcgtggatatgcggatcgtcaataccgagaagaatggccgcctgcgtatccggctcgttcatccgcgccagaaacagctgggcgtcgctgtcgttctcctccagcgcgcagtagcgcaaccggacctcgtgggaggcaagggctttgctcacgctctggatcacgcggtagtaaaagatgtcggaccgctcgtcaaacgcccgctgcggggcaaaaaccaccaggctgttaagcagcagacgccctgccgccatgccgtccattacccccagctcgcgcgcgcacgccagcacctttgcacgcgctttttcgctggtattcgctttccccgccagcacccgcgacacggtgctgatggagagctgcgtgcgggccgcgatttcggtgatttttagccttttgtccattttgtgatctggctccatttgcgaaatgaaaaaattttcatagcgtgtttgtcaggcaataactggcatgaatgccatcatgccagagtgttttcgtcggttatgagaaattttgcacaaaatccacttttgcccactcattttcttccttaaggtgaacttgtcacacagcttccatactagttgtatagcaacttaagcattataagcggatagaaatcaaaggcataacaatctgtgtgacacctgaaactccgtccccttaccgtccgtcttgtggagagtaaaatgagtcaggacatcaataacaccattgcgacaagcaaaacccgtcgcgtcatcaagaacctgcgctggtacgtgctggtgctgtttttgctgggcgtcaccgttaactacatcacccgaaattccttaggtattctcgctccggagctaaaagagagcctcgggatgaccaccgagcagtactcctggatcgttggcgccttccagatcgcctataccattttccagcccctgtgcggctggctgattgacgtcattggcctgaagattggctttatggtctgcgccgggatctgggcgctgatgtgtatcttccacgcgggcgccggaagctggctgcacctggcgattctgcgcttctttatgggggcttctgaggccgccgccaccccggcgaacgccaaaaccatcggcgaatggttcccgaaatcagagcgtcccgttgccgccggctgggcgggcgtgggcttctccatcggcgcgatgctggctccccctatcatctactttgctcacgcctcgttcggctggcagggcgcgtttatgtttaccggcgtgctggcgctgctgtgggtgatcctctggtgggcgttctaccacaaccccgagcagcacccgaacctgagcaaggacgagctggcgtttatcaagcaggataacgaaccgcctgccgtcaaactgcccttcctgaccgcgctgaaaaccgtctcgaagaacaaacgcttctacggtatcgccatcccggcctttatggcggaaccggcctgggcggtgctgagcttctgggtgccgctgtaccttgccaaagagcacggtatggacctgaagcagattgcgatgtttgcctggctgccgttcctcgccgccgacctcggcagcgtggcgagcggctacctgacgcgtctgtacacccgcctgttcggctgctcccgcgtgaactcggttgtcgccagctccgtgaccggcgcgttcctgatgatctcgctggccatcgtggccattacccgcgacccgtatatcaccatcgtgctgatctccatcggcggcttcgggcaccagatcatctcctgcatgctgagcgccctggtcgtggagtcgttcaacaaaggtcagatggcgaccgtcaacggcatgcgcggctcggcggcgtggatcgccagcttcctgttctcgctgttaatcggtgtgaccgccgacaaaatcggctttaacccgctctttatcgccatgggcttctttgacctgattggcgctctcttcctggtagcatttattgctgaacgtcgcgcgaagcgcgcctgatagtggatgtattgcatatgaaaaccctgaaaaactggacccttgatacgcagtcggcaaaccatctggaactgttggtcgatagccagcaccgcctgtgcctgtatgtgctggaagagaacctgttccgcgtgctgatcaaacgcaagggcgagctggcgctggaccgcacctggagcatcgcaccggaaaaagacgtgccgtgggaaggtcgccgtcgcgacgatctgagcggcttctcctgccccgcctggacgctgacgcagcaggacgatacgttaaccgaggcaaccgagcagctgcgcgtcaccgtccaccagccgctgtggctggagtggcactaccgcaatgacgcgggcgagtggcagccgctggtcaacgaccgccccaccagcgcctacctgctgaacgcccacggcgacggcgtggcgcactacctcagccgccgcaaggacgagcgtttctacggcctgggcgagaaagcgggcgatctgcagcgcaacggtaaacgctatgagatgcgtaacctcgacgcgatgggctacaacgccgccagcaccgatccgctgtacaagcacattccgttcaccctcacccgccgcgacgacgtgagctacggcctgttctacgacaacctcagcagctgctggctggatctgggtaacgagatcgataactaccacaccgcctatcgccgctggcaggcggaagcgggcgatatcgattactacatctttaccggcaggcgcgtgctggacgtcaccaaagcctttgttcgcctcaccgggaaaacgctgttcggaccgaaatggagcctgggctacagcggctcaaccatgcactacaccgacgcgccggacgcgcagaatcagctgatgaactttattcgcctgtgcgaagagcacgccattccgtgcgactcgttccagctttcgtctggctatacctccatcaacgacaagcgctacgtcttcaactggaactatgacaaggtgccgcagccgaaagtgatgagccaggccttccacgacgcgggaatgaagcttgcggcgaacatcaagccgtgcctgttgcaggaccatccgcgctacagcgaagtggcggaacgcggtctgttcattcgcgattcagaaaccgatgcacccgaacgttccagcttctgggatgacgaaggctcacacctcgactttaccaacccgcagacggtgcagtggtggcagaacggcgtcaccacgcagctgctggagatgggcatcgactccacctggaacgacaataacgaatatgaagtgtgggacggggaagcccgctgctttggcttcggcaaggagatcgccatcaagcatattcgcccggtgatgccgctgctgatgatgcgcgcctcgctggaagcgcagcagcgctttgcgccggaaaagcgtccgtatctgatctcccgctccggctgcgccgggatgcagcgctacgtccagacctggagcggcgacaaccgcaccaactgggacaccctgcgctataacatccgcatggggctgggcatgagcctgtccgggctgttcaacgtcgggcacgacgtcggcggtttctccggcgacaagccggacgccgagctgttcgtgcgctgggtgcagaacggcgtgatgcacccgcgctttaccattcactcgtggaacgatgaccacacggtgaacgagccgtggatgtatccgggcgtcacgcctgccattcgcggcgcgattgagctgcgctaccgcctgctgccgtatctctacaccctgctctggcaggcccacgccgacgacgagccgatgctgcgcccgaccttcctcgaccacgagcacgacgcgcaaacctttaaagagtgcgacgacttcctgctgggccgcgacctgctggtcgccagcgtcgtcgaagccgggcagcgcgagcgccgcgtctggctgccggataacgaaacgggctggtacgatttttacactcacgcgtggtatgcgggcggacaatccatcgtcctcgatgcgccgctcgaaaaactgccgctgctggtgcgcgccggggccggtctgccgctcagcgagcgcatcacgcatgtgagtgccgaaaaagatacgacccgcgagctgaagctgttcccggtgaaaggcgtcggcacaacctcggggctgctgtttgaagacgacggtgaaagctggggctacctgaacggcaatgcgctgtgggtggaatgggagatggtgtgcgatggcgcaaccatcaacctgaaggtgaacgcgcggggggattatcgtccggcgtggaaggcgctgaaggtgtcattaccggcgggggaaaaacgtacgctgcgggtgaacggggttgaaaggagtgagtgggtgctctgaacattgccgggtggcggcttcgccttacccggcctacaaagtcacccgtaggcccggtaagcgaagcgccaccgggcttttttttagccgtcgatacctttgctgcgcaggtaatcttcgtagttaccggtgaagtccaccacgcgctctggcgtaatctcgatcacgcgggttgccagcgagctgacgaactcgcggtcgtgagagacgaagatcagggtgccctgatacatctccagcgccatgttcagggattcgatcgattccatgtccaggtggttagtcggttcgtccatcaccagaatgttcggtttttccatcatcagcttgccgaacagcatgcggcctttctcgccaccggagagcactttagccggctttttgatgtcgtcctggctgaacagcagacggcccaggatgctgcgcaccgcctgctcatcgtcgccttcctgcttccactggctcatccagtcgaagacggtcaggtcattttcgaattcgtactcatgatcctgcgcgtagtagccaatctgcgcgttctcggaccatttcacggtgccgttgtccggctgcagttcgccgaccagggttttcagcatggtggatttacccacgccgttggcgcccagaatggcaatcttctcgcccacttccagcagcaggttgaagtttttaaacagcgggccttcatcgaagcctttggtaagggcctccacttccagcgcgttacggaacagcttcttatcctgctcgaagcggatgaacgggttctgacggctggaggctttaacctcttccagcttgattttgtcgatctgacgcgcacgcgaggtcgcctgacgcgacttagaggcgttagcgctgaagcggctaacgaaggactgcaggtccgcaatctgcgctttcttcttggcgttgtccgccagcagacgctcgcgcgcctgggtggcggcggtcatgtactcgtcatagttgcccggatacacgcgcagctcgccgtagtccagatccgccatgtgcgtacagaccatgttcaggaagtgacggtcgtgcgagatgatgatcatggtgctgtcacggtcgttgagcgtctgctccagccagcggatggtgtcgatgtccaggttgttcgttggttcgtcgagcagcaggatgtccgggttagagaacagcgcctgagccagcagcacacgcagcttccagcctggcgcaacttcgctcatcgggccgtaatgctgttcaaccggaatgccgacgcccagcagcagctcgcccgcacgcgcttccgcagagtaaccgtccatctcgccgtactgcgtttccagatcggccaccttatagccatcttcttcgctcatttcggccagcgcgtagatgcgatcgcgctcctgcttcacttcccacagctccgcgtgccccatgatcacggtgtccagcacggtgaactcttcgaaggcgaactgatcctgacgcagcttaccgatacgctcgttcggatcgagcgagacgttgccgagggtcggctccagatcgccgccgagaatcttcatgaaggtggattttccgctaccgttggcaccaatcaggccgtaacggttgccgccgccaaatttgacggaaatgttttcgaacagcggcttactgccaaactgcatagtgacgttgctggtaactaacacggggagattcctgcgaaaagtgtgataaacacggcattatgccacaattccgaattgagatcccgtgttgcggcaatccactaaactttaacaaaatcgaaaaaaatgtgatttcgtacacatctgaattccctgttagcgggaatgcacatataatgcgctcccatcacagattcagacttatcaactcatcgccagaatggcttagatacctcgcacaacatgaacatgaaattaacaacgctttttgcggcggcgttagccgtagtaggtttttgtaagaccgcgtctgcggtgacgtatcccctgccgaccgacggaagccgtctggtgggtcaaaaccaggtggtgacggtgcctgagggtaactctcagccgctggagtatttcgccgcgcagtaccagctgggcctgtctaacatgctggaagcgaacccgggcgttgacccgtatctgccaaaagcaggtaccgtgctgaatattcctcagcagctgatcctgccggataccgttcatgaaggtatcgtgatcaacagcgccgaaatgcgtctgtattactacccgaaaggcaccaacaccgttatcgtgctgccaatcggtatcggccagctgggcaaagataccccgctgaactggaccaccaaagttgaacgtaagaaagcgggcccaacctggaccccaaccgccaaaatgcacgcggaatacatcgctgcgggcgaaccgctgccagccgttgtgccagccggcccggataacccgatgggtctgtatgccctgtatattggtcgtctgtatgcgattcacggcaccaacgccaacttcggtatcggtctgcgcgtaagccacggctgcgtgcgtctgcgtaacgacgatatcaagttcctgttcgaaaacgtgccggtcggtacgcgcgtgcagttcatcaacgaaccggtgaaagcgacgtctgagccagacggcagccgctacatcgaagtgcacaacccgctgtccaccagcgaagaccagatcaacaacaacgagatcgtgccgattacgctgaacagcgcggtgcagtccgtgacctctcagcctgacgtggaaaccaccatcgtcgaccaggcgattcagaaccgttccggtatgccggtgcgtctgaattaatcacgcgtattaaaaaagcgggcttcaaggctcgcttttttttatccgttattcacgataacaatcccgccgtggtcgtaccgatagtggcagtgggcatactccagcgcggtgccatcttccagataaatgacctgctccacctccagcaccggatcggtttcctcacagaccagatgctctctgtccagcgcgctgggctttagcgcccgcaccacccggtatgaccccataattttcagccccagggtctcctgcacgtactggaacaccgaaccttcaagatggcttttcgtcaggcccggcaccagattcatcggcatcaccgtggaatccagcgacatgggttcgccgtttaataagcgcagacgaataaagtcatagacgggcgcatcggcgttaatcatcagcgacgcctgctctttttcgttcgggaagcgcagttcaaaatgcaccacctggctggtaaccgtgcccagatgttcccaggttttggtggcaccgaaatagtcgctgccggagagatcccactgcgagagctggaggaagtttttgcggatgaacgtcccttgcccctggcgggtgtagaccagcccttcgacgatcagctggcgcatcgcctgctggatggtcatccggctggtgctgaactccgccgccagcgcaaactggtccgggagcggttcattggcggcgtactgctggctgataatgcgtttcttgatttcccgcgctatggtgatgtacttcgccgccatcgtcattccttacagttagttttctatcccgctgtttttcaacgccactcgctcggcaatcttgaggaaaggcaggtagaagaatacaccaaatacgatgattgccaactgcactaccaccgcccgccagtctcctgccgtggccagccaggcgctgagaatcggcggcgtggtccacgggatcatcaccacgcagcgcgacatgaatcccagcgtggtacagagccaggcgaagtaaatgcctatcgcgggcaacagcacaaacgggatcatcagcggcaggttaaagacaatcggcaggccgaagatcaccggctcgttgatgttgaataagccgggcgccagcgacagacgcgccacctgcttcgccgactgctggcgcgagaagataaatatcgcaatcagcagcgagatcgtgctgccggttccgcccaccatgccaaacgtcggcacgaagatgttgttgatgatgtgcggaatgggctggccgttggcgaaggccagcatgttctcgttggtgttgatcagcagaaacggctccagcaccacgctgttgaccaccgactgatggataccgagcgtgaacagaaagttgccgaagctgtagatgaaaatcgtccccggcaggctggtgttgatcagccgcagcggctgctggataaaggtggtaatgagatggatcagatccgtgtgcagcacgtttgccagcacggccgccagcaccgcgaacagggagagcgtgaggatcgtcgggatcagcgcggtaaaggatttgctgaccgctgggggcacattttccccgagcgatatgtgcagcgccttcaggcgcgaaatcgcgataaacacttccgttgagagcagcccaatcagcaccccggcgaaaatcccggtggagccgatattggcgaaggtcagcacctgcgtgacgttcaccgcggcgtcgctgccaacgggcgtaacctgtaagcgcatcggcatcataatgataaaactgctgacggcgataaccactgccgaaaccgggttgtcgaaatctttgttgcgcgccagtgaccaggcgatcatcggggccagcagcagcgcggcgatgttaagcgtgccgttgataatcgcctcgccccacactttgaagtgtgccagcgtatcgccgtgaaaaatccacgggaacaccacgttgttcaccagcaccgccaggccggcgaggatgaaaatcggcatcaccgtggcgaaggcgtcgcgcagggagcgcaggtgcacctggtttgccaggcgcgccgagaactcgacaaacttatcgacaaaggactgcatgtgcggtgtgatttttgtttcagacatagcggatagttcccatcaatcagtcacaaaaacggcccggcagcgtacggcttacatctcgcgtccgttggtatggataacctgttttaaccacgcgtagctcttcttcggcacgcgcctgaggtctttcaggtcgtggttttcccggttgacgtagaccacgccgtagcgcttacgcatgtcgccctgggagctgagaatgtcgattaacccccagccgaggtagcccatgacctctgccccatcctcgaatatcgccgctttcatcacctcgatgtgcgcccggtggtagtcgatgcggtaggtatcctcgatggggttgacgccatcccaggactcaatcacgccaatgccgttttcaatcgggaagaccggcatgcgccagtcgttggcgtagcgggtaatgatggtgcgaaaaccgagcgggtcgatctgccagttccactcggtggctttcaggtaggggttatttttctcgccgtgcagcaggtaatcgttgaccggcgtgccttccgggatcgcatcgctgtccagcgttttgctggcgtagtagctgaaggccatatagtcgtttctggtgcgcgccagtagcgctaaatcttcggcgcggtagatatcaccaaagccttcctgctccaccaccgccatcaccgccgggctgtagccctgcccgtcaaagacgcgcagcaggttctggttgaggaactcgtcatactgctgggcgcagaagatatcgcgcggtttgcaggtggccgggtagatcagctggtgcgccagcatgccgcccatcagctggcccggtttcgtctggtgcagatactcggtcagcgccatgtgcgccaccatggtgtgatgctgcagctcgtacagctcgcgcagggtttgatcgcctttcatgtagccagaaatgcggaatgcttccggcatatggaagatgttctgctcgttgaaggtcagccagtacttcacccggtcgccaaagcagtcgatcatctttttaccgtagcggataaaggcgtccattacgcggcggtcattgaagccgttgtactcctgcgccagcgccagcggcatatcgaagtggtaaaggcagatcatcggctcaataccgcgggcgatgagatcgtcaataaagcggtcgtaaaacgcgatgccctcgtcgttgaacgcgccgtcaccctgcggacagacgcggctccaggagatctggaagcgatagcagttcatgcccagatcctgcatcaggtcgaaatcttcccggtagcgatggtaggagtcggtcgccactttccagtcggagatgttctccccggcctcacgaatgtcgtacaccgacatccccttcccgccctcgttccaggccccttccgtctgcatgctcgataccgagttgccccataaaaagttggccggcagctgattgctcatgtttcctccctatatgactagtcatttaaaatttcatgactagtcatataggcgaagatggcatgtcgatcaaagcggaggatcgttttttgtgaggtaggttggaaagaagacgccgggcaggaaaaatgattcgcgcaaaccctgttattgaggccggtgcgttagcctatgcaaaatcacatttcccgatcgtgccgctggctggcctcataaaatcactattaacttaatgagcacgaaccacggcccaggccgaaaaatataaatctcaaccctatcaaatggaaaatgacgctcatgaagatatctactcgccgtatcgcattcgctctcagcttagcgttgccatgctcaatgactcacgcggcaacggtgtatacgggtgataaggtgcagggagtgccggttatctcgactctggatgtatcagacctgacagcaggacagcatcgcttcatgttcgagggggttgagacaggaacaggacagcgctggtatgtccccatcatggtggcaaaaggcaaaacggacgggaagaacgttctgctgcaggcgggcgtccacggggatgagctaaacggagtgcgcatcgtacaaaaagtgatggaacaactggaccccgcaaaaatgaacggcagcgttattggcattataggtccaaaccgttctggacttgaaagggtctcccggacatggtccgtttcaaccgatggtggcgagacgatcgactacaaccgcgtgcatccaggaaaagaaacgggtaaccctgccgagcgtcaggcatggatgatgtggaataaggtttacaaaggaaatgtcgacctggcgattgactatcacacccagtctaccggaacggcttatccgctgttcatttatgccgactaccgcaatgcggatgcccggacgattgcagaactttttccggccgatcaaattaagaaagatcccggcgaagccggctcaatggagacaacctttattcaaaatggtatcccggcgataacggccgagacgggagagccgaggatttaccagcaggatatgattgccaggggtgtagagggtgccctcaatgtactgattcattacaaggtgattgaaggcaaaatcggcgcaaccgccagcagcaataaaacgtatattggtaatgcgatcagttcaatacgagcaaccacgggtgggtttgcggaagttttcgttaaacccggcgacacggtcaaagcaggacaagaggtcgccctgcagcgaaatgcattcggtgatgttgtcgcgaagtattcagcagagcgggacggcaaagtactgtcagttggaacagatgtcgtgagagaaccccgagccctgctggtaagaatccttgagcaaaacccagcggcaacctgcaaagacggttgctgattcccgccacagcccatcgttgaatcggcaaaagcgtgctcagtgaaataagccgctttcgccgatttctgtaccgatgggcaaacaaatttaaaaattacctgatgcggagagttactgttgcgcgagctgattacggcgatactctccctgccgctccagcatccagccgggatactcgcgcggcagcgcgctcaccgcatccagctgtttgagctcgtcttcgcttaagcggatcccggtggcggcaatgttgtcgtccagctgttcaacgcgtttcgcgccaatgatgacgctggtcaccgctttctggtgcagcagccacgccagcgcgatttgcgcaacggagacgcccttgctttcggcgatagtgcgcatcacgtccacgcagtcaaaggcgcgatctttgttcaccggcgggaagtcaaactccagacggcggctaccggcttcgctctgcccgtcgcggccatatttcccgctcagcaggccgcccgccagcgggctccagaccatcagcccgacgccttcgctctgcatcatgggaaccagctcgcgctcaagctcgcgtccggcgatggtgtaatacgcctggagggatgcgaagcgcgccagcccgaggcgctcggaaatacccagcgctttggcaatctgccacgccgcccagttcgagacgccgatatagcgcacgtggccgtgctgcaccaggttatccagcgcatacagcgtctcttcaatcggcgtggccgggtcgaagccgtgcagctgatagagatcgatatgatccagctgcaggcggcgcaggctctccttcacgctgctgatgatgtgatagcgcgagctgccgcgcgagttcactcctgccgtcccggtttcgccaaatactttagtggcgactactacgttctcgcgcggaattttcaggtttttcagcgcctggccgacgatcgcctccgaacgcccttccgaataaacatccgcggtgtcgataacgttgatcccggcatccagcgcgcggcccaccagctgttctgcttcgctttgctggagctgaccaatcttgccccacatgccgccttcaccgccgaaggtcatggtaccgaggcagagttcagaaacgaacagtccggtattgcccagtttttgataacgcataacgctttcctcgcatgtcgattgggtgtctgttagttatacccgcccctctgccatcgcgaatgtggcgttcctgtccgtttcttgcccaatcctctgaaaatttatccgcgcggggcgtcgccaaagacgctgtagtccggcagctgcacctgctgatacggctcccagccgccgccgagcgccttgtagagcgccaccagatcgagtgcgctttgcacctgcgcctgcgcgcgctgctgctgggcctgcgccagctgccgctgggcgtccagcacgtcgataaagctggcgatcccctgccgatagctgtcgctcgccaggtcaaaggcgttttgcagggcatcaatggttttcgccaggcccgcttcacgctgctggtcggtgcgatagctcaccagcgcattttcgacatcgccgagcgcagtcagcaccgtttgacgatagtccagcaccgccgccccctgctgcgcgcgcgccaccttcacgctggaaacaagtcgaccgccctggaaaatcggaatggagacctgcgggccaaagctgtagaagtggctgctccagtcggtcagccagttggtttcgctgttgcgcaggccaaactgcccggagagggtaaaactcgggaacagctgggccaccgagacgccaatctgcgccgtggcggcatgaagattcgcctccgcttcgcgcacgtccggacggcgtcgcgcgagcgtagacggaatgccggtttgtacgatatccggcaatgcgggcatcggctgcacgctttgtaactccgcatcgagcgcacccggcggcttgccaaggaggatcgccaggccattcatcgcctgccgcgcctgcgcctggtactgcggcagctgcgcctctaggttacccagctgtgcccgcgcattttctacatccatctgcggggaaagcccgccccgctggcggctttcggtcagatccagcgtctgctgcgcgcttttaatctgggtgttcagcgtggcgataatactctgcgccccgcgcagctggagccacgcgcgcgccacttccgcctccagcgacaccagcgcgtcgttacgctgctcgatatcggctttctgctgcgcctcggcggcttccacctgtcggcgcaccttgccccataggtcaatttcccactgggcgtcgaagctgccctggtagaggttgatcggctgcgtcagggggcctaacgcgccccgcagctcaggatcgacattatccagctggtcatacacgccgtgggatttcagctccccttccagcccgagctgctggcgcgtcgcctgcagattgccgttcaccgacgggtaaaacgccccgcccgcctggttaatctgctcgcgcgcgccggcgatgcgcagcaccgtctgctgcagcgtcaggtttccggcgatggcgcgctcaaccaggctgtcgagctgcggcgagccgaaggtcttccaccagcgcgggttggtcgcggcggaggtcgtctgcgattttaccccgctgtcgcccttatcgttccagtgcgtcacggcaggcggcgcgggcggctgatagtccggcccgacggcgcagcctgccagcagcatcattatcatcagggggtgtaaacgtctgtgtatcatcagtgtgctcctgcactcccctcgctcttaaccggcgagagcaacaaacaaaacggaatcaatagcaaggccacggcgctcagaagggtaaagacgtcgatgtaggccaaaaagcgcgactgctcgatcatggtctggtacaggcgtccggtggcaatcccggtgggatcgcccacctgggtcgtgaagttctggatcgcctgggcgctttcgcgtattgcctgctgaaactgttcgttaaacggcgaggcgtggtacgcaaggtgcgcgctatgcgcctgagaccgttcggtgatggccgccgtcgacagcgagatcccgaccgagcccgcgacgttacggaacatagtgaacagcgccgccgcgtcggcattcagccgtcttggaatagaaataaaggcaatggtggtcaggggcacaaacaggaaccccagccccagcgactgggcgctgcggaacagcaccagggtttcaaagtcgatatccggggtcagcgtgcgcgaccagaagaacgacaccgccaggcaggtaaagccaaaggcgataatccagcgcgtctgcaccaccggcatcagcttcagcaccagcgggatcgttaatacaatcagcaccgccccgggcgacagcaccagcccggaccaggtggcggtatagcctaaatcctgctgcgccagctgggggatcaccaccgagctgccgtacaaaatcatcgccattcccgccatcagcaggctggaaattgcaaagttgcggtccttcatgcagtgcagatccaccaccggctttttggcatacaccagccagtaaatggcaccgataatgccgattagcgttaacaccgcgaaggtacggataaagttcgagtagaaccagtcctcatcttctccccggtcaagcatcacctgcaggcagccaagccctaaggcgatcaggccgatccccgtccagtcgatggtcagcttctctttagacttgctctcccacggcggatcttccagcagctggtagatcgccagcaccgtgacaatccccaccggtatattgatgaagaacacccagcgccaggagtagttgtcggtgatccagccccccagcgtcgggccgaggaccggtgcaacgataatcgcgatggaggaaaggccgaacgctttgcccctgtcctccggcttaaagtagtcgagcagtaccgactgctgcgtgggctgcagcccgccgccaaaaaagccctgcatcacgcggaacaggatgatctgccacagctcggtggcgatgccgcagaggaacgagcagacggtgaacatgacgatgcagatcaggaagaactgcttgcggccaaacacccggctcagaaacgccgagatgggcagcacgatgccgttcgcgaccaggtagctggttaacacccaggtggattcgtcatagctggacgagagcgagcctgcaacgtgcggcagcgccacgttgacgatggtggtgtcgaggatctccataaacaccgccagggtgacgacaatcgccaccgcccacggattgctggcgggcttccagctgtcgtggctgtgatccgtcattccaccgtcaccttcggcgcgaccgacagccccagcggcagcggtttgttcggatcgagccccttatcaatcacgattttcaccggcacgcgctgcacaattttgacaaagttaccggtggcattttcagccgggaaggcggagaagcgcgagccgctgccctgctggatactgtcaacgtggccctcaagcgccatatccggccacgcgtcgaccgacatggtgaccttatcgccgggcttcatgcgctcaagctgggactctttgaagttcgccaccacccacacgttcggcgaaaccagcgagaacagcgccgtacccgcctgcaccagcgtgccgggctgcacgttgcgtttggtgacaaaaccgtcgaatggggcgcggacttcggtgtaagagaggttcagattggccgtttccagctgcgctttggcctgttcgacctgacgctcgcgcgcttcaacgttggtttcctgctggcgaatttgcagctgtacctgctctgctacttccagctgcgcctgagcgctggccagacccgcctgggcgctgcgcagttgcgcattcgcagaatcaatactttgctgggtggtcgcccgcggatcgacgccgcgctggcggcgatactccgcctgcgcgttcgccagatcggcctgcgctttcagcacctgcgctttggcttcgtcacgctgggcgggatactgcactttagagagtgcgagctgcgcctgggcctgatgcagctgcgcgatggccagcccaagctgggcctgagcctgatcgcgctgcgcggtggtatcccgcggatcgatgaccaccagcagatcgccttttttcacgcgctggttatcgcgcacccgcagctcggtgacgtagcctgccgttttcggggcaatcgtcaccacgtcgccgtcggtaaaggcgtcgtcggtcgtctcttcgttacgggttaaaaaccaccagaccagcgccacgacgaccatcaccaccacgacaatgccgaggataattaacggttttttgcccgggcgcttacgctcattattatttttgtcctgctcgtcagcaggtggagtttgatcttcagccatagttcagcaacggtcctgtcagtgagcggcatcacactatgccgttcactaaagctaggacgttgctatacgtttgccaggaaaaactgacaaattgcgcactatatgagaaggaatattccgaaaccgatcgccgcggcccaaaccagcatcgggattgaccagagatggaagcgccaccagatgcggcgatcgttggccatgcgcagggcaatcaggttggccagcgagccgggcagcagcccaaacccgccgatattcaccgcccaggccagcagcgtgtccggcggaacgtagttgagcagcagaatggtggcaggcacgttgctgataaactgcgacaggccaatcgccgtcagccacagtcccggctgagacagcgtgctgacgctgtggagcacgttttgcagcaccggaagctgaataagcagatgcacatcaataaacatcaccataaagaccagcagcagcgtccagtccacgctgaccagcacgcgtcgcgcgaggacgacaaagcccgcggcgacaagcaacacgcccgccacctcatacttcagctccagcgcgaacagaaagacgatgtataacccgaggcagctccagaccagacgcggctgccactgcgggcccgtggtgccgctgtggtactgcagttttttatccggaaaggcaaaccagcagaccgccagcagcgacagcatcatcaccagcgccagcggcgccatctgccaggtaaaagcggcgaacgacagcccggaacggccccagaggaggatattttgcgggttaccgatgggcgttaacagagaaccggcgttaacggcgagcgcttcgaagatgatcagccggcttaccgggatctcgcaaagcttacgcagcgtgagggtgaggggcacgatgataaacagcgccacgtcgttggtcagaaacgtcgacagcaccgcggcggaaaacatcataaacagggacaacctgcgctcggtggcaaagcggcgcaccattttacggcccagaacgtcaaaatagccgctcagctcaacccctttggtgagcatcatcaggccgctcagggtaatgatggtgcgccagtcaatggcagcgggccaggcctgcggcgcaaacggcacaaagaggcttaaccctgcgccaatgagtaataagagatggaagaaacgatcgcgtgccagagcctgcagtccagggattttcattcagcggagggaccatatttaagggtaaattcgcgaaacttcaccagcgtctcttcgctgacgtggtgttccatgccttccgcatcccggcgggcaatctccgggctgacgcccagcaccagtaaaaaattctcgacaagctggtggcgctcgcggctctcctgcgcgagtttctccccttccggcgtcagaaagaccccgcgccaggggatcatttcaattaggcccacggaggcgagacgttttaacatttttgcgacagttggctgcgatacccccagcctggcggccatatcgacctgacgcgcttccccgacctcacgaatcagatcggaaatgagttcaacataatcatcaatcagttcacgccggtgcgcttctcggacctggcgaaaaccttcgacatgctcttcaacattcaccagttgcgtcgtttttttaatggttggcttacctgcgcgacggctcattgtacttcctcagtggggtgacgcttccagcgcccggtatcgagagcgcacattgtaaaccatccctccacaagcacaaaaaattaacgaaatagccatagctatacaatatagcctgtgctatatctgtatgtaatgcagtcacccttcacggatcgaagggatcaaaaatcaggaggtcttatgaacgaatttaagaggtgcatgaccgtgtttacccactccccctttaaagtgcgcttaatgctgctgaacatgctgtgcgatatgtttaacggcaaaccgcatcaggatgataaaccttcccactaagcggcgttgcggtacgccgcttcattttcccgtcacaatctcgctctaaactggcttccagccgccctattcccgatcttttttacggatttgcaatccccttcgcaaaacatctgcttagcaactgttgatattatttagcgctcgcactatcttcttgcagccctgcacaatttgcggctcgctgaagcggaccctcattccctctccacgcactgtcaggcaggttatgacccttgacgccagggtgagcacatggcgttttcatccatgatagtgacctatgaatgtaaccctgatagataccgttgtgacccgcagccgggccttaagcccgtggacgggtttttactttttgcagtcattactgattaactttgcgctgggttatccctttagtctgctctacgcggtggccttcacctgcattctgcatgtgctatggcgcgccgccccgcgcgcgcaaaaagcgttaatcggcatctgttcactggttgcggcactctatttcccgtttggtcaggcgtacggctcgccaaactttaataccctgctggcgctgcactcgaccaatatggaagagtcgacggagatcctgacgatcttcccgtggtacagctacgtggtcgggctctttatcttcgcattgggcgttatcgccatccgtcgtcagccgggcgagaaaaaatcctggggtaagatcgaaatactctgtctggtgttcagcgttgccgtggcgtttgtcgcccccatccagaacattccctgggacggtaagctaagacttattaacatcggctatccggttttccgcttcgtgaaagatgtcgttgttaacaataaagaggttctcgacgaacaggcccgcatggctgagctttccaatatgaaagacacctggaacgtgctggccgtgaagccgaaatatcacacctatgtagtggtgattggtgaaagcgcgcgtcgcgatgcaatgggcgcgtttggcggccactgggataacaccccgtttgccagttcggtcaaaggcaccctgtttaccgattatgttgcggccagcggctcgacgcagaaatcactcggtctgacccttaaccgggtggtggatggcaaaccgcagtttcaggataatttcgtcaccctggctaaccgcgcgggttttcagacgtggtggttctctaatcaggggcaaattggcgaatacgatacggcgattgccagcatcgccaaacgggctgacgaagtgcagttcctgaaaaacggcgactttgaagctgacaaaaacactaaagacgaagcgctgctgaaaatgacggcgcaggtcttcgccaccccgcgcacccagccgcagctgatcgtcctgcacctcatggggtcgcacccacaggcctgcgatcggacaggcggaaagtacgcggagtttgtgcagtccaaagagacctcctgctatctctacaccatgacgcaaaccgacgacctgctgagcaagctgtacgatcagctgcgcaatacgggcgacagcttctccatggtctatttctcggatcacgggctggcgtttaaagagcgcggtaaagaggtgcagtatctggcgcacgatgacaagttccagcagaacttccaggtgccgtttatggtgctgtcgagtgacgataaaacgcatcgcgtcattaaagcacgccgttcagcaaatgatttcctgcagtttttctcgcagtggacggggattaccgccgggcagataaaaaatgtttatccgtttgtctctaacaagaaagctcccccagtgtacgttaccaacttcaagttacagaaagttgactacaaccatctgggtacggatatttttgatattaagaataagtaattgccgtctcgtgcggaccgatgccctcaccctggccctctcccacggggagagggaaccaacactcaaaacggcaacctcaggttgccgttttgcttttatcttcgacaaaaaaaatccgccacagtgggcggattttttatttaatcaccgaagtgattagaagcggtaacctacgcccgcgatccaggtgccaacgtcaacgttgcggatacggctctgctcataggagaagtccagagcaacgtcctggattgggttgaactgcaggcctgcgccataggagaagccgtagtcgctgttgcttgcagtgcggttcagaccttcgttttcggtctgctggaatttaccgtagccaacacctacaacaccgtagatgcttgcccagtcgttcagacggtaagctggaccagcagtgataccgtagtactggcctttgttgtatgcgccgttttcagaacgatctttctcggtgtaggtgaaagaaccgatcacgcccagtgggttgttatcctgctcgtaacgatacttcaggttgaaaccgttagctttgttcatcacgccctgatagtcgctctgagcgtaaccaccagtaacagtagaagtagcagctacagcggtacctgcggaaacagccagtacagcggccagtgctgaaagacatgcaatttttttcataaccacctcaaatgtgatccaagtaagtccgtaagttttaaatatatcaaaaaaatttgcgaaactctttgtgattcgtgatgtctaatgaagcctttcctgtaacagaacgtttccagcgtaagctatctctttaaaatcacatgcaattttcactactaaatgcgcatagtgcgcgtctgcgccgttacattcatccagattattcctaatctgacaggcgataaatccaccagcgcttatccattttacggatttcacctgcttttttttcaacagcgcctcaaccgtcgccgcatatttcctttacactgcaacctttacctcatttgacataagctgacaggagaaaggatgcctgggttatcccgcacgtcgtcggtctggttgccggttgcagtcatactcattgccatgttgtccattcaaagcggcgcctcgctggcaaaatcgctttttccactggttggcgcgcccggggtgaccgccctgcgtattgttctgggcacggcgatactggtggtcattttcaaaccgtggcgactgcgctttaaaaaggagcagcgtttaccgctgctgttttatggactctccctgggggcgatgaactacctgttctacctctccatccagacgataccgctgggtattgccgtcgcgctggagtttaccggcccgctggcggtggcgctgttctcctcccgacgtccggtcgattttatctgggtcgtgttggccgtactgggcttatggttcctgctgccgctgggccagagtgtttctgagattgacctgacgggcgcagcgctggcgctgggcgcaggtgcctgctgggctgtctatatcctcaccggccagcgcgcaggggaagagcacggaccggcaacggtggcgctgggttccctgattgcggccatcgtgtttgtgcccatcggcatggcgcaggcgacagaatcgatctggcaatggtccgtcatgcccatcgggctggcggttgcgattctctctaccgcactcccctactctctggagatgattgcccttacgcgtctgccgacgcgcatatttggcaccctgatgagcatggagcctgcgcttgcagccatttccgggatggtgtttctcggtgaaaccctgacattgacccagacgctggcgctctgctcgattatcgcggcatcaatgggatcgacgctcaccatgcgccccgaacctaaagttgagaaagtggatatcaactaaggccatatattctgcatggattccacgccatgcagaataaaggccaaaaagacagtcgttataatttcttacactctgattcctgccagctaaatatccctctgcgctgagttcctcattcagcaattaagattgatctgtatcaatttaaaaattattcaatattttcaatacattaatttctcaacctccttctcgctattaaaccgataggcacagccaaaccgcagagaaaaaatccggtgctatacttagttccgtagttacctgggacataaacatcaagaggatatgagattatgagtaccgctaaactggtgaaaacgaaagcgtctaatctgctttatacccgtaacgatgtatcggacagcgacaaaaaagcgaccattgagttgctgaatcgccaggtgatccagttcatcgatctttcgctgatcaccaaacaggcccactggaatatgcgcggtgcaaactttattgccgttcatgaaatgctggatggcttccgcacagcactggttacccacctcgatacgatggctgaacgtgccgttcagttaggcggcgtggcgctgggtaccacacaggtgatcaacagcaaaaccccgctgaaaagctatccgctggatatccataccgttcaggatcacctgaaagagctggcggaccgctacgcgattgtggcgaacgatgtgcgcaaagcgattagcgaagcgaaagacgaagataccgcagatatcttcaccgccgcgtcccgcgatctggatcagttcctgtggttcatcgaatctaacatcgaataattcatacgaattttctatcaaaccctcgccttccggtgagggttttgcacatctatggtgcacgttttttgcctgagaacgtgcaaaagtgaagaaattgtaataatcacctcacacaaccgttaacggaagattgttttttcgtcagaatttacgctaaatatctccccgtcagttgagccaaacgaggcgcaccaaaacagtgctccactttggtgcaataaaacctcattgccccatttattgtgcaatgcatgacatcatcccctttgcaaaacaacagcttgtaaagttggcacgattttttcattgtgccacctgttctcgcaggggatcgccccgtggatataaaaggaaatgctatgaagtctgtattaaaagtttcactggctgcacttaccctcgcttttgcggtgtcctctcaggctgccgacaaactggttgtggcgaccgacacggcgttcgttccgtttgaattcaaacagggtgataaatacgttggttttgatgtggatctgtgggccgcagtcgcaaaagaactcaagctggattataccctgaagccgatggacttcagcggcatcatcccggcactgcaaaccaagaacgttgatctggcgctggcgggtatcaccattaccgacgagcgtaaaaaagcgatcgacttctctgacggctactacaaaagcggcctgctggtgatggtcaaagccgataataacgacgtaaaaagcgtgaaagatctcgacggcaaagtggtggcagtgaagagcggcaccgggtcagttgattacgcgaaagcgaatatcaaaaccaaagacctgcgccagttcccgaacatcgacaatgcgtacatggaactgggtaccggccgcgctgacgcagtgctgcacgacacgccaaacatcctgtacttcatcaaaaccgcgggcaacggcaagttcaaatctgtgggcgaatctctggaagctcagcagtacggtatcgccttcccgaaaggcagcgacgacctgcgcacgaaagttaacggcgcgctgaaaacgctgaaagagaacggcacctataacgaaatctacaaaaaatggttcggtaccgagcctaaataatttcacctgaattcaggtttgtaacgcccggtggcgctgccgcttaccgggcctacgtttttcgtttttcaccacggtatacaggaatacatcatgcagtttgactggagcgccatctggcctgccattccactcttgcttgaaggcgctaaaatgaccctgtggatttcggtcctgggtctggttggcgggttgattatcggtcttgtcgccggtttcgcccgcacctacggtggctggattgcaaaccacatcgcactggttttcatcgaagtgatccgcggcacccccattgtcgtgcaggtcatgttcatctacttcgccctgcctatggcattcaccgacctgcgcatcgacccgttcagcgccgccgtcgtcaccattatgatcaactcgggcgcctacattgcggaaattacccgcggtgcggtgctgtcgattcataaagggttcagtgaagccggtctggcattaggcctttcacgtcgcgaaacgatccgccacgttattctgccgctggcgctgcgtcgcatgctgccaccgctgggtaaccagtggatcatcagcattaaagatacgtcgctgttcattgttatcggcgtggccgaactgacccgtcaggggcaggagatcattgctggcaacttccgcgcgctggaaatctggagtgcggtggccgttgtctacctgatcattactctggttctgagcttcgttctgcgtcgtcttgaaagaaggatgaaaatcctgtgattgaatttaaaaacgtttccaagcactttggcccaacccaggtgctgcacaatatcgatctgaacatcaaacagggtgaagtggtggtgattatcgggccatccggctccggtaagtcgaccctgctgcgctgcatcaacaagctggaagagatcaccagcggcgacctgattgtcgacggtctgaaggtgaatgacccgaaagtggatgaccgtctgattcgtcaggaagcgggcatggtgttccagcagttctacctgttcccgcacctgacggcgctggagaacgtgatgtttggcccgctgcgcgtgcgcggtgccaacaaagcggcggcagaagcgctggcgaaagatctgctggcgaaggtcggcctcgcagaacgcgcccatcactacccttccgagctgtccggtggtcaacagcagcgcgtggcgattgcccgtgcgctggcggtcaaaccgaagctgatgctgtttgatgagcctacgtccgcactcgacccggagctgcgtcacgaggtgctgaaggtcatgcaggatctggcggaagaagggatgacgatggttatcgtgacccacgaaatcggcttcgcggagaaagtggcgtcccgcctgatctttattgataaaggccgtatcgcggaagacggtaacccgcaggagttgattgcgaacccgccgagcccgcgtttgcaggagttcctgcagcacgtctcctgatccctcgcgttacgctaagccgggcctgcccggcttttttacgccagattgttcccaaaaatccccctccgcgtcccgacttctatacttatcattttgttcgacattttcaccggaggacgccgtgccgtggatcctgttgctgttgattagcctgtttagtgcgccatcgttcgccgtcgcgatccccggtgtgaccaccggaacaaccgccagccagcaaagtacgccccctccggaaccggatgttgaacagaagaaagcggcttacggcgcgcttgccgacgttcttgagaacgacacctcccgaaaggaattaatcgagcagttgcgcaaagccgccgccacgccgccccaggaaaccgttccgacactcacccctccgcaggtggaggagcaaaaaacggtgctggaaaatgtcaccgacgtgagccgccactatggggaagcgctctcctcgcgctttgctcagctctaccgcaacctgattggctcaccgcataagccgtttaacccacaaacgtttaccgccgccgccatgcagttcctgatgctggccggtgcagtcttccttttttactggctggtgcgcctgtgcgcgtggccgctgtaccgcaaaatggggcaatggggacgcagaaagaatcagcagaaaagcagctggctgcacctgccgctgatgatcgcctcagcctttatcatcgatttactgctgctggcgctgacgctgttcttaggccagatgctggccgacaggctgaacgcgggcaacaaaaccatcgccttccagcagtcgcttttcctgaatgcctttgccctgattgagttcttcaaggcgctgctgcggttactcttttgccctcacgtgccggcgctgcgtcccttctccattcgggacgagagcgcgacatactgggcgctgcgcctgagcgtgctcagcgggctgattggctacggtctgctggttgccgtgccgatcatctccaaccaggtgaacgtgcagtttggcgcgctggcgaacgtcattatcatgctctgtattaccgtctggtcgctgtaccttatcttccacaataaaaagaccatcactgagagcctgctgcatctggccgatcgttccctctcgttcttcagcctgtttattcgcgcattcgccctggtgtggcactggctggcaagcgcctacttcatcgtattgtgcttcttctcgctgttcgacccgggaaacagcctgaaatttatgatgggggcgacgttcaaaagcctggccattatcggcatcgcggcatttgtctcggggctgctgtcgcgctggatctcgaaaaccatcaccctgtcgccgcaggtacagcgtaattacccggaactgcaaaaacgggtgaacagctggatgtcggtatccctcaaggtggcgcgcattctcaccgtctgcgtggcgatcatgctgctccttaacgcgtggagcctgtttgatttctggaactggctgcataacggcgcaggtgaaaaaacggtcgacattctgattcgcatcgcgctgattttgttcttctctgccgtcggctggacgctgctggcgagcctcatcgagaaccgtctggtgtcggatattcacggcaggcccctgcccagcgcgcgggcccgcaccttgctgacgctgttccgcaacgcgctggcggtcatcatcagtaccatcaccatcatgattgtgctgtcagaaatcggggtgaatatcgccccgctgctggccggtgcaggtgccctggggctggcgatctccttcgggtcgcaaacgctggtgaaggatattattaccggcatctttatccagtttgagaacgggatgaacacgggcgatctggtgaccatcgggccgctgaccggcacggtggagcggatgtcgattcgctcggtgggcgtgcgtcaggataccggagcgtaccacatcatcccctggtcctcgatcaccacctttgccaactttgtgcgcggcattggttccgtggtggcgaactacgatgtggatcgtcatgaggatgccgataaagcgaagcaggcgctgcgcgatgcggtagaagagctgatgcagatggaggatattcgcgggctggtgattggcgagccgtcatttgccggcattgtcgggctgacgaacacggcctttaccctgcgcgtgtcgttcaccacccagccgctgaagcagtggacggtgcgctttgcgctcgacagcatggtgaaaaagcacttcgatctggcgaacgtgcggatgccggtacagacgtatcaggtcctgccgccgcccgcagcgccgcttcctccgcaggagccgacgctgtagccggattgccgggtggcggcttcgcctgacccggcctgcgacgcagcgctatttgcggcgtttgttatcgtccataaatgaccaggcgataaagcggctttgcttctggccctgcgccatctcttttttcactactttcgccgcgcccgcttcggtgagcgcgcggtaaagtggcggcaggttatctccgcgggaaaccagcgtcgtaaaccacttcacctgacggccaaactgtttgctttccgcaatcatgcgcaggataaaggccacttcgccgccttcacaccacagctcctgctgctgaccgccgaagttcagcgcggcgtcttcagcctgacccaggttgcggcgcttgcgctcgctgcccgcgcgggccgctgccgccgaatcgtggaacggcgggttgcacatcgtggcgtcataggtttcatttttatggataatgccgttgaaaattgaggcggcctctttctgacgacgcaggcgaatggcgcggcttaatcccgggttcgcgttgataatcgcctgggcgctggcgaaggcctcggcaccgatttcgcttccggtaaagcgccagtgatactcatgcgcgccgatcagcgggtaaatcaggttcgccccggtgccgatatccagcacggtcgcctgctgaggaataatgccatcacggtcttcagccagaagatcggcaaggtgatgaaggtaatccgcgcggcccggaacgggtggacagagaaagccttccggaatatcccagttcgccacaccgtagtagtgtgcgagcagcgctttgttcaacattttaaccgcctgggggtcagcaaagttgaccgaaggttcacccgcgggggtctggacaatatagtcctttaacggcgggcagctcaggcataacgcattcatgtcgtagcggctgcggtggcggtttcgtgggtgcaatcccggcttttgggaagtcatggcgttctcctttaaacagcggcgtaagataccctttgctggcccaacggtaaatctttctctgcggcgcttaaaaagccgccataaatcaaacacctttatgtctatgatctgtcagcgtaatgtcaatttttatcgttcaaaaaataagcagatcatcatcaaatatttgcgctaagtcacactcgtcaggcttctaaacttaaggggaatcacctgttgtttcctcatgaggatgtgattatgaaaaagtacctgacccttgttgttatcgccgctgccctgacgaccgcgtcattttctgcgatggccgttcagtcgctgacccagagtaccgacaccagccagcttcagcctgcaggcaccgtctccgtaagccgcgcaagtaacctggacgatctgcagaataaactggcggaaaaagcccgccaggaaggtgcaaaaggcttcgtggtgaattccgctggcggagataaccatatgtacggcacagcgaccatctataaataatctgccccaccccatgactgcatctgcctgccagatgcagtttgctctcttcctcgccttgattgttcattttttaaccccacattaaaagcagggcataacaccatttcaggaggatgctatggcttccggttgggcgaatgatgacgccgtaaacgaacagatcaacagtacgattgaagatgcggttgcgcgcgctcgcggtgaaatcccacgcggcgaaagcctggaggagtgcgaagagtgtggagaaccgatcccggaggcgcggcgaaaagccattccaggcgtaaggttatgcattacctgtcagcagaataaagattcaaaaaatgcttcacattcaggttataatcgcagaggttcgaaagacagccagttacgttgactttcctttacctaagttaaccgccggggcgcttacctttacgctcacgatttttagcgaaccgcgtagcaaaatgtgcccttcatttttgttctgtaaagcgcatccacaagaagtgtaaagcgccactttgaatttattagtaatcaataagttatttgtcattcaatttttttgattgaccacgtcaattctcttcgattttatctctcaagaaaaaacgtgatactcatcacatcgacggaacatcgtccccttaacagaaacacctgcgagagattacttatgaaaaccatcaaatatgctgtagctgctgttgccctgtccgctctgtctttcggcgctttcgccgttgagccagtctcttctgctcaggcacagaacatgaacaaagttggtgtggtgagtgctgatggcgcgaccaccctggacggtctggaagccaaactggctgagaaagcggctgctgccggtgcaagcggatacaccattacctccgctaacggcaataacaagctgagcggtaccgcggttatctacaaataatcgcctgaatgaatgctgtcccctcgccaaaccctctggtgagctgctccaaccctcattgaccctgttgtttgttacccttgcttgcccgtccgccactggacgggcttttttttgcctaaaacgccgcgtccacgcgtttgagaccggcctcgaccgtatcaacttccccggttgcaagcaggcagcaggccatctgcagcttaatggactgcggcacaggcacgtttccggcgaggcactgttcaatccagtgcgcggtggtgtgcgggtctttcgcttcagggagaatgacgtccgtattctcttccccgcgcgccagaacagcgcgcgtaccggcagaatcgatcagcatcagctgagggcagcgcagtggattggcatacacctcaccttctgtaccgtgcatcagcagcgccctgccgccaatctcctcaaaaaatttcccgacacgccccacgtattccgggtgcgatacgctggaaaggcgcaatgcggcatcttctgcaaacggcgtcgccagcttcgccagggtgtgggcgctgttgcgcacgcccatccgccagcgcatatccagctgcttttccagcggcgggcacagggctccgacggggatgtaaaccggctgatggccatccagcttcgcctgcgcctgtcctgcatgacgcgttggctcaatccccaacatgccgaaaatggtctccgtcaacacgcgggtgggatcttcgctgaccccgtgaaccaccaccgggaaccccagcttatgcaataagatcgccagcagcggagtgaggtttgcctgcttgcgcgcgccgttatagctcgggatgacaatcggcatcggttttgccaccggcggcgtcaggcgcagcgtttgcgcctgcatcgcctcgtaaaaaccgcgcatctccgcttcgccttcgcctttgatacgcagcgcaatcaggatgccgcccatctccaggtcaggtacctcgccatcgagcattcgggtatacagggcgcgagcagtttcatggtccagatcgcgggcgtggtttttgcccctgcctacctctttgataatcttgcgataatccacgacatctctcctgaaaatatccttctggtaacaatatagccctgttaaacgttcggacgttagtttttttctacatcatcaacgttctgtttttaaggataaaaatgaaactcaagcattatttcaattatttgtgattccagcagaagattcttaatgcaccattatttgtttaaataaccagcggaaagtcattaagggtcaacggtgaaaacgtccaggcaacgctctcaccagaaacatatcaggatttgttatgaacaaggttgctttaggtttaatcatcgccgcagcggtgggatgttctgcatccacgtttgcggcaacaaacggtgaaggtcagatcaatttcaccggtgaaattatcgattctgcttgtcaggtcgtgaatggattaagtaatccattaaatgttcagctgggaaaagtgtctaaaacggtatttaccggtgctggctctaccagcacattaacgaagtttgatattcagttaacgaattgtcctgacacggtcacctccgcagccattaacttcggcggtacgccagatgcgaataacaacgccacgctggccttaacgccagatagcgatgcggcgaccggtgtggcaattcagctggttgatgcctcagagcagcctgtcagcctgtatacgccatcgcagcagtatcaattaacctccggtacggcggttaacgatctggaatttggtgcccgttatatccaaaccggcgctgcgatcaccgcaggccctgctaaaaatgccctcgcttcggtcagctatcctgagtgtcctgagttcgaaaaccgctaagatcgggcggatgttcaccggaaacgacgattatgccgggtagcgtgtttatgttacccggcctgttgagcggtaccgtgggctatttatccccgccacccaaccgatacgccagcgccaccaccagcgactgcaccaggcacagtgtcgccgactgagaccgaaacgcgtccacctgcgcctctttcaccacaaagcagagatcgctgaacgtcgccagcgggcttatctggctgtccgtaatcacaatctgccgcgcgccgacgctggcggcggtttcgctgaccatcaccgtctcttctgcgtacggcgagaagctgatcgacaccacgatgtcgcgcgccttaatgcggctgatttgctcgcgcagcatcccgcccatgccgtcgagcaggataggacggcactccagatggctcagagcataggtgaggtacgcggcgacgctaaaggatcgacgcagtccggcgatgtagatggtgtcggcgtcggccagcagctgtaccgcgcgctccagcatctccggctcggcgcgggcggccagctgctgcagcgcctgcgcgttcgagcgggcaaactcctgcaggatatcgagcggcgtttccggcacggcctcgctctccatctcgcgaaatagccgcgcgcggtcgctgtagctggcggtctcctccaccaggttcatgcgaaacagctgtttcatttcgttgaagccggtgaagtcaaaggcgttggcaaagcggatcagcgtcgagggcggcacgtcggcgcgctcggcaatgacggcaaccgtatcaaaggccacgctgttggtgttgtccagcacgtagcgggagacctgctgcagcctcttgctcaggctatcgtagcgatcgcggatttgctgctgcagttcgttcaggctggttgctgtcgtcatgttatcccccaaatacagtcatatgattctaaacgcaaaaccgcgtcttttaaatgtcggccatccatctggcagcaaaaatgaaacagaagattcagtcatttcctcgcccgagaacccttaatagcgcacgcggcgtcagtggtgctggctgttaacataaaaatccatccttgatcacaataatcatcatttattttatttcagcttaaaatggaatatttgtttcatatatagtgttcagtacacagtgttcaggtcaagtcacgtatcaacagcgagaggttaaggatggagacggtagcgaattttattcacggcgaatgtgtcaccggttcaggccagcgcgttcaggcgatcttcaacccggccaccggcgagcagatccgccaggtggtgatgagtacggcacaggaaacggagcaggcgattgccgccgcgcagcaggcgtttccggcgtgggcgcgtcatgctccgcttaagcgcgcgcgcgtcatgttccgcttcaaggcgctgctggaagagaatatggaacgtctggcccgtcttatcagcgaagagcacggcaaggtcttctccgacgcggtgggcgaactgacccgcggcctggaagtggtggagtttgcctgtggtattccgcatctgcaaaagggcgaacactcggcgaacgtcgggaccggcgttgacagccactcgctgatgcagccgctcggcgtctgcgccgggatcacgccgtttaacttcccggcgatggtgccgatgtggatgttccccattgcgctggcgaccggcaacaccttcgtgctgaaaccgtcggaaaaagacccttcgctcgcgctcgcgctggcgcagctgctgaaagaggccggcctgccggacggcgtcttcaacgtggtgcagggcgataaagagtccgttgacgtgctcctgaccgacccgcgcgtgcaggcggtgagctttgtcggctccacgccgattgccgaatacatctaccagaccgcgtccgcccatggtaagcgctgccaggcgcttggcggtgcgaaaaaccactgcattttaatgccggatgccgacatggagatggcgaccaacgccatcatgggcgcggcctacggcgcggcgggcgagcgctgcatggcgctctcggtggtactggcggtgggcgataacaccgccgatgacctctgcacccggctggaaaaacagattgccgcgctgcgcgtcgggccggggctggaccagacgccggaaaacgaaatggggccgctcatctcctccgcgcaccgcagcaaggtgctgggctacatcgacagcggagaagcgcagggggcgacgcttcgcgtggacggtcgcggcttcagcgtgaagggccacgagcagggctatttcgtcgggccgacgctgttcgataacgtcaccccggagatgaccatctataaagaagagatttttggtccggtgctttctgtggtgcgcgtagcagattacgccagcgcggtggacctgattaaccgccatgaatatggtaatggctcggcaatcttcacccgcgacggcggctgcgcgcgccgcttctgcgaagaggtgcaggcgggcatggtgggcgtcaacgtgccgatcccggtgccgatggcattccacagcttcggcggctggaagcgttccatcttcggcgcgctcaacgtccacggcaacgacggcgtgcgcttctacacccgaatgaaaaccatcaccgcgcgctggccggaaatgcagcaggagacaggcgctgcgttctccatgccgacgctgggctgacaggagattttatgcaaaccgaacgtatgaccatggcccaggcgctggtccggttcctgaatcaacagtacgtcagcgtggacggcaacgaaacgcccttcgtggagggcgtcgccaccatctttgggcacggcaacgtgctgggtatcggccaggcgctggaacaagatccgggccatctgcaggtgatgcagggctgcaacgagcagggcatcgcccatatggcgacgggatttgccaaacagcaccgccgtcagcgcatctttgccgtcacctcctccgtcgggccgggcgccgccaatatggtcacggccgcggcaaccgctacggcgaaccgcatcccgctgctgctgcttccgggcgatatctacgccagccgccagccggacccggtgctgcagcagatcgagcagtatcacgatctcagcattagcaccaacgactgcttccgtccggtctcccgctactgggaccgcattaaccgcccggagcaactcatgagcgcgatgctcagcgcgatgcgaacgcttactgacccggcagataccggtgcggtgacgatttgcctcccgcaggacgtgcagggggaagcgtgggattacccgctgagcttcttcgcgcgtcgcgtgcacctcatcgagcgtcgtccgcccgatccgcagcgtctggcgcaggcgcgggcgctgatcgcccgcaagcgtcgcccgctggtggtgtgcggcggcggcgtacgctattccggcgcgcatgaggcgtttcgcgaatttgtcgagacgctgcagctgccgtttgccgaaacccaggccggaaagggggcgctggtaagtgaccacccacttaacctcggtggcgtaggggtgacgggcgggatggcggccaaccagctcgccccgcaggccgacctggtgatcggcatcggcacgcgcctgaccgactttaccaccggctccaaggcgctcttttcccatccggacgtggaattcctgctgctgaacgtggccgagtttgacgccctgaagctggacgccacggcgctgattgccgacgctcaaaccgggctcgaggcattgacccacgcgcttggtgattaccgcagcggctggggagaggcgatcgctgaggcgaaatccgcctggcgcgacgagtgccgtcgcctgtgggatcgccagtggcgtcctgacgacgcgcccgaagtggcggggcacctggacgcgcagctggcggaatacggcgaggcgctcaatacccgcctgacccagacgcgggtgctggggctgatcaaccagcatgtggaagataacgccatcgtggtgggggcggccggttcgctgccgggggatttacagcgcctctggcaggtcaaaacgccggacagctatcacctggagtacggctactcctgcatgggctacgagattgcggcggccatcggcgcgaagctcgcccgccccgagcagccggtatacgccatggtgggggatggctcctacatgatgctgcactccgagctgcaaaccgcggtgcaggagggcattaagatcaccgttctgctgtttgataacgccagcttcggctgcattaacaacctgcagatggggcacggcatgggcagctttggcacggaaaaccgccatcgcaatccggaaaccggacggcttgacggtccgctggtgaaggtcgacttcgcgcaaaatgcgcagagctacggctgccgcgcgtggcgggtgcacgacgagcaaaccctgctggcggcgctggaggcggcccgcgcccatcctggcccgacgctgctggacatcaaggtgctgccgaagaccatgacccacgactacgcctcctggtggcgaaccggtgatgcgcaggtggcagagtcgtctgccgtgcgtgaggccgcggagcaaacgcagtcgcaggtgaaaaaagcccgtcagtattgagttttcccgaagtaacgaaattttcatttcatttttgttttcccctcatcctaaccctctccctcagggagaggggacggctcggtgtggttttttactccctctccctgagggagagggccggggtgaggggagttgccgcacgttcacctgtgttgtgagattgataacaaaatttatctcattcatctcaaaagtgttaacccgcactcaaaaacataattttcactatttataaaaatgaaataaatgttttatttatagggtcgttagttcacagcattcaccaacaccgggagccgttatgtttaacattgctttactgggcgctggccgaattggccaggtacatgcagctaacatcgccagccacggcgcgaccacgctctggtccgtggttgacccgaatcaggaatttgccacccgcctcgccacgcagtatcaggcccgccagcagagcctggatgaagcgatgaccgaccctaacgttcacgccgtgctgatcgcctctgccaccgatacccacgcggacctgattgaaatggccgcccgccacggcaaggccatcttctgtgaaaagccggtccacctcgacctcgcccgcgtgcgcgactgcctgaaggtggtcaaagagtacgacgtgccgctgtttatcggctttaaccgccgctttgacccgcagttccgccgcgtgaaaaccgacgcgcaggccgggcgcatcggcaagccggaatcgctgctcatcatctcccgcgatccgtctccgccgcccgcggagtacgtgcgcgtctccggcggcatgttccgcgatatgaccattcatgactttgacatggcgcgcttcatcatgggcgaagagccggtgtcggtgtatgcccagggcagcaacctggtcgatccggcgattggcgaggcgggggacatcgataccgcgtttatcgttctgaaatatgcctccggcgcgatggcgaccatcgttaacagccgccgttcatcttacggctacgaccagcgcctggaactgcacggctccgaagggctgctttgcgcgggcaacattcttgaaaaccaggtgcagcactacggcaaacagggctgcaccagcgcgctgccggaacacttcttcctgcagcgctacaaatccgcttacgccgcggaatgggaacactttgttgcggtcctgcgcggcgaagcggtgcctgactgcagcggcgatgatggtgaacgtgcgctgtacctcgcggataaagcgctggagtcactgcgcagccagcgcgagatcgtcctctaaacacaacaaccctacacagagagacataataatgaaaaaactgatcgtagccgccctcatcgccatgacgtccggggccgccctcgccgaaaacgagcaaattgtgttcagtacgccaaacctggccatgccgtttgaagttcacatgcagcgcacggcggtaaaagccgcaaaagagatgggcgtgaagcttcaggtgctggacgggcagggcagttcaccgaagcaggtggctgacctggaaaacgccatcacccgcggggcgcagggctttatcgtctccccgaacgacgtgaacgcggtctccagcgcggtggatgaaattcaggatgcgaagctgccggtggtcacccttgaccgctccgtcgacagccagaagaaggtgccgcactttggcgccaacaactacaagggcggtcaggcgattggcgattttgtgaaaaccaaatttcccgacggggcggagatcattctgctgaccggccagccgggctcctcctccaacatcgaacgcaccaaagggatccgcgacagcctgaaggcgggtggcgataagtacaagatcgtcgccgatcagaccggcaactggatgcgttctgaagggatgcgcatcgtggaaagcgtgctgccctcgctgccgaaacgcccgcaggtgatcctctccgccaacgacgacatggcgctgggggcgattgaagccctgcagagccagggcgtgaaaccgggtgaaatcctcgtgaccggctttgatgcggtgccggaagcgctggcccgcgtgcgcgacggctggctggcggtaaccgccgatcagcgtccgggctttgcggtgcagacggcgatgagccaactggtggccaacgtgcgcgagaagaaagccatcaccggggccgactacccgccaacgctgatcaccaaagagaacctgcagcaggctgagcgtatcggtgaggccggtaactgatttatccgcagccgccgctggcgcggcggctcactctaaaggaggagcagaccgatgtcgcaacccttactgaaagtgaccgacctggcaaaaagcttttccggcgtctgggcgttaagcagcgcccagctgaccgtcggcgcgggcgagatccacgctctgctgggggaaaacggggcgggtaaatccacgctgctgaaggcgctcgcgggggcgcagccgcaaacccgcggggagatctggttcaacggcgaaacgctgccggtggacgactccccggtggaacggcagaacaagggcattatcaccatctatcaggaattcaacctgctgcccaacatgaccgtcgcggaaaacatgtttctcgggcgcgagccgcgtaaacgtaatctgatcgtcgacgaaaaggcggtcaatcaggaggcgcaggtcattctcgactatctgcagctgaacgttgcgcctaccaccccggtcgcccgcctgagcgtggcccagcagcagatggtggagatcgcccgggcgctgaccctcaacgccaggctcatcattatggacgaaccctccgccgcgctgagcgacagcgaggtcgaaagcctgcaccgcgtggtgcgcgagcttaaaaaccgtggcgtgagcattatttacgttacccaccgtctgcacgaagttttccagctctgcgaccgcttcaccgttttccaggacggccgcttcactggcaccggcgcggtggcggagaccaacgtcgaacagctgatccgcctgatggtcgggcgcgacgtggcctttaatcgccgtcccgccagcgaaacgcatcatgaggacaaacccgtccgcctggcggtgaaggggctgagccgcgaaaagccgccgctggatccgcacggcatcgccctgcacgacatcagcttccacgtccacgccggggaggtcttaggcattgccgggctggtgggcgccgggcgcaccgaggtggcccgctgcctctttggcgcggacgcgtttacctcgggcagctttgagctggacggcgtgccctaccagccgcgtgacccgctgtatgcccttgaccagggcgtggcgctggtgccggaagatcgtaaaaaagagggggcagtgctgggactgtcgattcgcgacaacctttcgctctcgtgcctctcctcgctgctgcagtggcgctggttcgtgaacacccgcaaagaggacgatctgatcgagtcctaccgcaaggcgctgcagatcaaaatggtcaacagcgcgcaggaggtgcgcaagctctccggcggtaaccagcaaaaggtgatcctcgcgcgctgcatggcgctcaacccgcgggtgctgatcgtcgacgagccgacgcgcggcatcgacgtggggaccaaatcagaagtgcaccaggtgctgtttgacatggcgaaaaagggcgtggcggtgatcgtgatctcctccgatctgcctgaagtgatggcggtgtcagaccggatcatcaccctgagcgaagggcgagtgaccggcgagatccacggtgacgacgctaacgaagaacggctgatgacgatgatggccatcaaccacaacgccctgaacgcggcataacggagtttctcatgacgcagatgatttctaaaacgcaggccccggtcaaacgcgccggacgcatcgatcccatcgccttctttgagcgcttcggggtgctgattttcatgatcctgctgctgatcttcttccagtcgcagaacagcaactttttctctgaacgcaatattttcaacatcctgaccgaagtgtccatctacgggatcatggccgtggggatgaccttcgtcatcctgaccgccgggattgacctctccgtgggttccattctggcggtctgcgccatgaccgcggcgtacgtgattaagggcgacaacttcaccaccgtcgacccgaacgcctggggcggcatgagctggctgattgggctggggatttgcctggcggtggggacggcgattggcttcctgcatggtctgggcgtgacccgcctgcgcctgccgccgttcatcgtgaccctcggtgggatgaccatctggcgcggcctgacgctggtgatcaacgacggcgcgccgattgccggtttcgatcagggctaccgctggtgggggcgcggggagctgctcggcatctccattccgatctggatcttcgccatcgtcgccctcggcggctatctggcgctgcacaaaacccgctggggccgcttcgtctacgccatcggcggcaacccggaggcagcgcgcctggcgggggtgaacgtcaagcgcgtgctggtcagcgtctacgtgctgattggctgcctggcggggctggcgggcttcattctgagcgcgcgtctgggaagcgccgaggcggtggccgggatctcctttgagctgcgcgtcatcgcctcggtggtgatcggcggcacctcgctgatgggcggctacgggcgcatcggcggcaccatcatcggctccatcatcatggggattctgattaacggcctggtgctgatgaacgtctcggcctactaccagcagattatcaccgggttaattatcgttctggcggtggcgttcgacacctacgccaagagccgtcgcggcgcactgtgaggatagtgatgaaagaggttcgtattggattgattggcaccgggtatatcggcaaggcgcacgctatcgcctatgcccaggccccgacggtgttcaacctgcggggcaggctggtgcgcgagatggtagcggaagtcacgccggagctggcggcagcgcgcgcgcaggcgtttggcttcaaccgctccaccggcgactggcgggcgctggtggccgacccggcgattgacgtggtggatatttgctcacccaaccacctgcataaagagatggcgctggaggcgatccgccacggcaagcacgtctactcggagaagccgctggcgctgaacgcccatgacgcgcgcgagatggtcgacgccgcgaagcgggccggggtgaaaacgctggtggggttcaactacatgaagaacccgacggcgcagctggcgaaggaaattattgcccgcggcgagattggcgaggtgatccacttctacggcacccacaacgaagactatatggccgacccgctctcgcccattcactggcactgcttcaaagagaccgccgggctgggagcgctgggcgacctcgcggcgcatatcgtcaacatggcccagtacctggtcggggagattgagcaggtctgcggcgacctgaagatcgtggtcccggcacgtccggcaaaggccggatcgtcagacatgattgccgtcgaaaacgaggaccaggcccacgcgatggtgcgcttcgcgggcggggcgcagggcgtgattgaaacctcccgcgtcgcctgcggccgcaagatggggctgtcgtacgtcattaccgggaccaaaggcgccatcagctttacccaggagcgcatggcggagctgaagctctatctgcatgacgatccggtaaaccgtcaggggtttcgcaccctgctcgtcggtccggcacacccggactacgccgcgttctgcatgggtgcaggccatgggattggctttaacgatcaaaaaacggtggaggtgcgcgacctggtggacgggattgccgccgacgcgccgatgtggccggacttcgaagagggctggaaggtgtcgcgcgtgctggacgcgatcgcgctctcgcaccgtgaaggccgctggctgaacgtgaatgacattgtctgatgaggtatcaacgtggaaaagcagtttgatgtgatatgcatgggccgcgtggcggtagacctctacagtcagcagattggtgcccgtctggaggatgtgtcgagctttgccaaatacctcggcggctcgtccggcaacgtggcgtacggcaccgcgcgccaggggctgcgctcgtcgatgctggcgcgcgtcggcgacgagcatatgggccgcttcctgcgcgaagagctcagccaggtgggctgcgataccagccatctgattaccgataaagaccgcctcacggcgctggtgctactcggcattaaagaccgggacacctttcctctgattttttatcgcgataactgcgcggatatggccattacggccagcgatgtggacgaaagctacattgcctccgcacggtgtcttgccatcaccggaactcacctttctcatcctcagacccgcgaggcggtgctgacggcgctgggctacgcccgccgtcacggcgtgcgcacggtgctggacatcgactaccgtccggtgctgtgggggctgacctccttaggcgacggcgaaacgcgctttatcgccgccgataaggtcacccgcgagctgcaggaggtgctgcacctcttcgacgtcattgtcggcaccgaggaggagttccatatcgcgggcggcagcacggagaccctgcaggcgctggggcaggtgcgtgcggtgagccaggccacgctggtctgcaagcgcggtgcgctcggctgctcggtctataccgacgccattccgccccggctggacgacggcctgacggtgaccggcgtgcgcgtggaggtgctgaacgtcctcggggcgggggacgcgtttatgtccggcctgctgcgcggctacctgaacgacgagggctgggagcaggcgtgccgctatgccaacgcctgcggcgcgctggtggtctcgcgccacggctgcgccccggcgatgccgagcaaaatcgagctggatgactatctctcccgcgctgcggatgtgccgcgtccggatctcgacccgcgtctgaaccatctgcaccgggtgaccacccgtcgccgcgagtggccggagctgtgcgtgatggccttcgaccaccgcagccagcttgaggatatggcgctgcagtgcggggcgtcgcttaagcgtattccggcgctcaagcagctgatcctgcaggccagccgggaggcggcgagccgtgccgggctggcaggcaaagcgggcctgctgtgcgacggtacgtttggtcaggacgcgctgaacgccatcaccggcgaggggtggtggattggtcgccccattgagctgccgggctcccggccgctggagatggagcacggcaacatcggcacccagcttatcagctggccgcaggagcacgtggtgaagtgcctggtctttttccatccggaagatgcccacggcctgcgcctggagcaggagcagaaaatcgccgaggtgtaccacgcctgctgccagtccgggcacgagctgctgctggaggtgatcctgcctgcgaccatgccgcgcagcgacgagctctacctgcgcgccatctcccgcttctacaacctcggcatttacccggactggtggaagctgccgccgctttccgccgagggctggacggcactgagcgagattatcgaacgccgtgacccgcactgccgcggggtggtgatcctcggcctggatgccccggcagaacagctgcacgccgacttcagggccgcagcggggcagccgctggttaaaggcttcgccgtagggcgcacgctgttcggcgatgcctcccgcgcgtggctgaaacacgatattgacgatgcgcagctggtggcgcgcatccgggacaactacctgcagcttatcgcctggtggcgcgagcgcggacacgcataatggagacgacaatgagtgtacaactgggcattaacccgctgacgtggacgaacgacgatctgccttctctgggcgcagagacgccgctggagacctgcctgagcgaaggtaaagaggccggttttgcagggttcgaactgggcaataaattcccgcgcgaagcgcggctgcttggccccatcctgcagcgccatggcctgcagctggtctccggctggtactcaggccgactgctggagcgcagcgtggaggcggagatcgccgccgtgcagtcccacctgacgctgctgcgcgagctgggggcaaaggtgctggtgtttgcggaagtgagcggctgtattcacggcgagcagcagaccccggtgcatctgcgcccgcgtttcccgcaggcacgctggaaggagtatggcgagaagctcacggaatttgcccgctacacccagcagcagggggtgcagattgcctatcaccaccatatggggacggtgattgagtccgctgacgacgtggacaacctgatgacccataccggcgaagaggttggactgctgctggacaccggtcacctgacctttgccggggccgatccgctggcggtggcgcagcgctgggcatcgcgtatcaaccacgttcactgcaaagacgtgcgtgccgacgtgctggcggacgtgaaaaaccgtaaaaccagcttccttgatgcggtactgagcggcgtgtttacggtgccgggcgacggctgcgtggattacccgccgatcatgcggctgttgaaggcgcaggactatcacggctggctggtggtggaggcggagcaggacccggcggttgcccatccgctgacctacgcccgtctggggtataacaacctgagccgcctggcgcgcgacgccggactgatttgaggaggtgacatgtcacgtctgttatcacgctggcaacagccgaatgcggaggggcgcacccagtccgtcacgccggaacgcgcagggtggggatacgtcggctttgaggcgtatgagctgcatgaggggcagcagctgacgctgcccgccgtcagcgaagagcgttgcctggtgctggtcgccggacgcgcctccatcagcacgccttccgcgcagtttaacgacatcggcgagcggatgagcccgttcgagcgcatcaagccgtgggcggtgtacgttaccccgcaggagacggtgcaggtgaaggcgctgacgaggctcgagctggcggtctgcgccgcccccggcaagggcacgtatccgacgcggctgattgcgccgcaggatatcgacgctgaagcgcgcggcaagggccataaccagcgctacgtgcacaacattctgccggaagataagcccgccgacagcctgctggtggtggaagtctggaccaacgagggctgcaccagttcgtatccgagccacaagcacgacacggataacccgccccgggagacttacctggaggagacctactaccatcgcctcaacccggagcaggggttctgcatgcagcgggtttacaccgacgacagagcgctggatgagtgtatggcggcctataaccgtgacgtggtcatggtgccgaagggctaccacccggtggcgacgatggccgggtatgacagctattatctcaacgtgatggccgggccggtgcgcaaatggatgttcacgtgggaagaggaccacgcgtggattaatcgagattatcccgcggatggcgggcactgaggctatttttttgccgggtggcgctgcgcttacccggcctacaatttacaaaatactattttgcttcaatcgcctgctcaatcgtccgggcgatagcctccggctggctcaccatcgacacgtggctcgcggagacctcggtggttttcgcatggatcgtcttcgccatcgcacgttcaagatcggggttgatcattcggtcatttttgctgaccacaaaccagctcggcttatcatgccacgccgcgtgggtcaccttttcaccaaacgcatcggccttaattggccccttcgtggccgcgattgcagtttgttcctcgggcttcacgtccggcgcgaaatccttcctgacggcgtccgttggcaggtataaatagccgtccgcattattggcgatacccgcgctgcccggcggcggcgggtagcttcccgcgaggtccgccgtcgactggccgccatccggcgcgaacgccgccacatacaccagcgatttcacccgcgcatcgttgcccgcttcgctaatcacggtgccgccccaggagtgacccaccagcacgacatccccctgggcgcgggcgatggcccgctttgtggcggcaacgtcatcgttaagcgacgtgagcggcagctggacggcaatgacatctgcgtgctgtttctgcaacagggtaatcaccttattccagctgctgccgtcggcaaacgcgccgtggaccagcacgacgctggttttgctctgtgcaaaggcactggcggaaagcgccagcaggcctgccgtcagtacagtcagtgctttcatcgtcagactccttaaaaatggtggaccgccgcatgaggcggtacggtgaattcgatggttttgtggtcgagcggcttgtgcgtcgggtcggccagaataatcgtcaccttgtgtttaccggcggggagtcccaccagaatcaccggctctccgctggcgtcagcccagtgcaacggcgcgtcatccaccaccacgtgaatgtgcccgatgcgcggggtgaccttgagcgcttcaggtccgaataccggctcgatgcgcaggttttcggcacggtactggataaacaccgcgcctttactcagcggcccggcaagcggcggatcgacgatcagttttgccggcggttgcggctgcgccagcggggcaacggcggcggggccgttaacgtccgcggcgctcagattgtccagcggcgtggcctgggcatgtgttacagatgccaggacgagcaggggtaaaattgcgtaacgacgaatcattgctctctctcctcatcagttctcaatggcgacagggaaagaaaaccatttttatgtatcggagatatttgccggagggggcgttttgtacccgtttgtcaccgtggcccgcgggatacagtgcgatacagtttgcctcccgggacggcgcacaatggctatcgccagcccggcaatcagcagcgtcaggcccgtcgatacccccattgcacccgcgatccccagcgttttatttagccacgcataggcatacggtgaggctgcggccataagctgaccggggataagcagcatgcccgtgcggcgggcatagctttccgcgctaaacagctccagcggcagggtggctttgacaagggtgaccagcccgttgatggcgccgtagcccagcacaaacccggccgcgcaccagacaaacagggcgctgcttattcccacaagaaaacacagcggcatagcaagagcggtaaagagcgtaagcttgaagggggttaagcggccacctgccagcacctccagcgagcgcgcgcccgtctggccgatcccccacagcatgccgatggcgaccggcaggccaaagtgggcaataaactccggcagatgggtggaggtgccgttagagacaaaggtgataagggcgatgaaggccgcataaagccaggcgttacgccgctcgttgcgcaggggcggcgcgatggccttcgtgttttccgtcagccgctgccggggaagcgtgcggatcagcactgcgctcagcaggccaagcagggcataaatgcgtaacgcgtcctgccagctcatgatgtgaagcaggccatcgcccagcggccagaagacggcggaggccagcccgcccgccagcgtgacgcgtgagatcgttcttcgcgcctgctgcccgtagaggttgaccagcgcggcgaacagcgcatcgtacagcgacaggcgcatcccagtgccggcgacaatccaggcgctgtaccagccataaagcgtccgggtatacgccatttctgcgcagcttgcggcgatcagcagcgttccgaccatcaccactttttgaccgccaaagcgtgccagcaggcgggcgacaaaaggagataccgccgccatcaccagcatcgccagcgtcaggccgaggtaaatctgcggtgacgaccatccccggtcggctgaaatggcccgcgcaaaggtgccgggcatataaaatgaaatcccccagttgatgagttgattacacccggcggtgagggcgaggcgacgaggaagggcagaggtttccatgagttttcattccgttatgcagttgtcctgagcataacgggcgcggtattgtgctggcagggctgcaaccttatgcaccgtataagagaaactttgaatgacgacgcttaatctgggctatctcgccaccttccgcctggttcaccagcgcggcagcttttcagcggcagcggacgttctgggcctctcccagcccgccgtcagcctgcaaatacgccagctggagcagtttctgcaaacgcggctggtggagcgtaccgggcgagggattaaggcgacggctgccggagaaaccttgctggcgcacggggagcgtattcagcaggtggtggatgacgccatccgggccgtgaatgcgtttagccacgacgtgagcggcaccattacccttggcacgggggcgacggcctgtattcatcttctgccgccgctgctggagcagctacgccgcgactatccgctcctgagcgtgggagtcacgacgggcaacaccctcgacatcgtcagggccattgaagagaaccgtctcgatatggggctggtgacgctgccggtgagcggcagagcgctggacgtcatgccggtgatggacgaagagtttgtctttatcgcctcaagggagcagcagggcgctttcagggagttaaccccggaggcgctccatgcccagccgctgatcgcctttgagacaggcagcgggacccgggcgctgatcgatggctggtttgccgcccatggggtagcgatggcgccggtgatgcagcttggcagcatcgaggcgatcaaacgcatggttcgcgcggggctgggctacagcatcgtgccgagaatggcggtagaacaggatgccgatcgcgaggggctatgcgtgatgtcgctgacgcccatgctgcagcggcagctggcggtggtgatgcggcaggataaaatcctcagcaaagggatcgcggcccttattcggctcgtacaacatccttcgggggggttagcggtcagcggtgtcgacggtcaggctggattgctgtgactgggttttgtcctgatggtggtaccaggcgccaatcgaagagtaaacgaagcggccaaagaaaaacaggaaactgataagcagtatgatgcgggtcattcgggtgttaaatcgatgtcgtttgcgcatacgcgtgacctgactcactctgtttttcctggataagccctcccgggcgatgaggatattaaggcacagtgggaagatggggtcaattctgtgatgtgtaaataaccgtcaacgtttgcattaactattgttattgaaattaataattgcatttaccatattgataatataaagaaaattatttcacaaaattcttctgcaaggcttatttgcgtgaaatagtttgatttaagtcaacggattcccggctctgatatttaaaatccctcctccacactgttcactctgcacgtcgcggggtggcgccaggtcaggttggatgcctgtctttatcttccctctggagaaaaaggggtttaaccgggcatctatgaagattttcgcttttctgaaaaacaataaataccgttggtgggcattgccgctactattaccggtggttttgcttcccgtgctgagcgtggcaaatacgttcacgcaactgggggacggtatcgcggcgctttattatttaccgctctcctttttgctctcactgatgatgttctttggcctggaagcccttcccgggatcgtgttgtcgctgtttatccgctattacccgtcggtcgggatgttcgaaacggttgccggggtgctccattttatggtccctttagtcctcagctggggcggctaccgggtgtttgcgcccagacgcaatatgacggcgtacggcgacatccggctgatggcgcagcgcatcttctggcaggttatctgccccgcgacgctgtttctggtgctgtttcagtttgcggtgtatctgggcgtgtatgagagtcgccagagcctcgcggggttgaaccctcttaacattcgtacgctcattaactaccaggcgctgctggtcagcgggctgacgggcgtgccgctgagctatctgctgatccgcctgatccgtcatccgcgctatatcaaaagtcttctctcgcagatccggttccagatagataaaaaggtgacggccgcggagttttcgctgtgggcgattgcgcttggcgggctgctgtcgctgctgctgctcccgataaatgaaaacagctccatcttcaccactaactataccctgtcgctgctgatgccggtgatgctctggggcgcgatgcgttttggctataagctgatttcgctgatctggaccccgatactgctggtgtccattcactatttttaccgctatatcccagtgaacgcggggtacgatattcagctggcgatcacctcttccagttacctggtcttttcgtttgtggtgatttatatgtcgatgctggcgacccggcagcgcgcggtgaacaaacacgcccgcaggctggcactgctcgatccggttgtccatatgcctaacctgcgggcgctgtcgcgcgatctggcgaaggatccgtggtcggcgctctgcctgctgcgcattccggagctggaaattctgggccgaaattacggcgtgcagctgcgtattcagtacaaacagcagctggcgcagtgggttaacggtacgctccagcccaatgagcaggtgtatcacctcaccggatatgacatggcggtgcggctcaacgcggaatcgcaccagcagcggattgacgccctggacgagcatatcaagcagttccgctttgtctgggacggcatgccgctgcagccgcaggttggcgtaagctactgctatgtccggtccccggttaaccatctttatctggtgctgggggagctggcggtggtggccgatctgtcactctcctctaatcacccggaaaatcttcagcagcgcggtgccgtccatttgcagcgcagcctgaaggataaagtcgcgatgatgagccgcctgcagaaggcgctcgacaacgacgaattcatcctgctggttcaacccgttcgcggcctgcgtggcgattgctatcacgaagtcctgctgcggatgccggacaccaatgggatactgatctcccccgatcagttcctgcccgtcgcgcaggagtttggtttgtcctcccgggtggatctgtgggtgcttgagcatacgctgcgcttcctggccgcgcatcgggaaagactgcccggccagcgctttgctattaatctggcgccttcaacagtgtgccgggtacagttcccgcttgaggtgagccgcgtgctggcgaaatacgctattgagccgtggcagctgatctttgaagtgacggagtgcagcaacttctgcaaccccgagcaggcgctgcatatcctcagtcagctgcagaaaatgggggtacgcattgcgattgatgattttggtaccggctatgcaagctacgcgcggctaaaaagcgtggacgcggatattcttaaaatcgacggcgacttcatccgcaatatcgtcaacaacagcctggattatcagattgtggcgtctatctgccatctggcgcgcatgaagaagatgctggtggtggcggaatatgtcgagaccgaagagatacgtagcgcggttcacgcgctaggtattgattatgtgcagggctatctgattggcagaccggcaccgcttgagtcactgctggaaacagaggcgtcctgcgcggacgcctgaaccgttacgcggcgacgtcggcgctctcttcctcgattttgagcagccagccggtgaccgcttcccagtactgctgctccttttccaggtccagcaggaccagcgcgttctggctgaaccagtcgtgcgggaagctcaacgtccagtgatggtcgtcggttttcagcttcagcgtgggcggcgtggtggtcgcctgacgctggttattgagcagcacgcccagacgcagcagctgaatgagcggcaggaactgctttttcttaaacagcgtgaagcgcggcaggtcgtcgagcttgatggctttgcggtgataccgcaccagggtcgccatcatggtttgctgctcctggttgaagcctggcagatcgctgttttgcaaaatataggccgaatggcggtgcatcccgctatggttgatgttcagccccacctcgtgcagcatcgcggcccatttcagcagcgcggcaagctgcgggtgcgcgagcttcggattctgctcttcccactgttcatacatctgcaccgtggtgtccagcacgcgcttcgcctgctcgcggtcgatgttgtactggttggccaggctttgcgcggtgcggctgcgaatatcctgatggcggaagcggccttccatttcgtacagcacgccttcgcgcagcgcgccgtcggacaggcgcagctctttaatggccagcgcatcaaacacgccgcagagaatggccagccccggcacgaagaccgccttacgctcgtcggaaagccccggcaggcttaaggcgtcaaaacttttatgcttcagcacttcgtcggtcagcagcgtcaggcgttcgggcgtgatgaacccatctttttcacccattgccagcagcacttcatgcgccgccttgatggtgcccgacgcgcccagcgccacgttccagccctgaatgcggtactgccaggccaggttttccagcttctggacagccgccatacgtgcacgctggaagttctcgcgggtgatggtgccgcccgggaaatacatctgcgcgaagctgacgcagcccatacggcggctttccaccaggcgaggctcaaagtcttcgccgatcacaagctccgtagaaccgccgccgatgtcgatcaccagcttgcgccctttttccggctgggtgtgctcgacgcccatgaagatcagacgcgcttcctcgttaccggagatgatctcaatcgggtaggggatcaccttttcggcccgcttgagaaactctggcgcgttcagcgcctgacgcagggtgtgggtgcccacgatgcatacgctggagggcgagaagccctgcaggcgttcagcaaacagcgacaggcagtttaacccgcgctccatcgcctcttcgctgagcatgctgcgttcatcaaggccatccgccaggtgtacgcgctgcttcagacgaccgatgatctgcagcgcgccatccacctcgcgggcgatgaccatgtggaaactgttagagccaagatcgaccgctgcgaattcctgcgggcgtggggtcttatcatttatcggcataggttaatcgggttgctcgagtgatttgatatagtcgtaaatcgccagttgcgaccgcactttacggcggttgccgcgcggtacatagcggttactgagttctttgtcgatatagcgcgccttcaccgtatcgctgaacaggatctcgataatgtcgagaatacgctgtttcagacgcggatccagcagcggggttgcgacttcaattcggtagtcaatattgcgcgtcatccagtctgccgaagagagatagacctgtttgtcgcctgcattatcgaaaatatagacccgatcgtgttccaggtaacggtcaacaatgctgatcacccgaatattgtcgctgatgccttccagttccgggatcagcgagcacatgccgcggatcagcaggttaaccggtacgccagagctggacgcggcgtacagcctgtccaccagtcctttgtcgaccagattgttaagcttcagggtgatgccggacgacagccctttctgggcattggcaatctctttatcaatcatatcgtacagcagacggcgcgagttctgcggcgagaccagcagatagtcgaagctgacagggcggtacgggttctcaatgaagttaaagacccggcgtacctcgttggtgatgcgcgcatcggcggtcagcagcgagtagtcggtataaattcgcgccgttttctcgttaaagttcccggtaccgatgtgggcatagcgcaccacgtcgtcgccctctttacgggagatcaggaacagcttggcgtgaattttgagacccggcgcggagaagatcacgtgcacgcccgcttccgtcagacggcgcgcccagtgaatgttcgcctcttcgtcgaagcgcgcctgtagctcaaccaccacggtcacttttttgccgttgtgcgcggcgtggatcatcgcatcgatgatgcgggaatcttttgccacccggtagatgttgattttgatcgccagcacgctcgggtcgaacgaggcctgacgcagcagctccagcacgtgttcaaacgtgtgatacggatagtagagcagaacatcgcgctcgcgaatggcgtcgaacccgttgcggaatttatcaaaccacagatggcgcaggcgcggcagcggcttgttcaccagattggccttgccgacgttcgggaagccaataaagtctttaaagttgtggtaacggccgcccggcacgatggagtcatagcgcgaaatggtcagcttctcgcgcagcatttctaccatggcgtccggcatatcgcgctgataaacaaagcgcaccggctcggccgtcaggcgttgtttcaggctggaggacattagctccatcaggctggcctccatctcgtgcaccaggtcatattcggcgtcacgggtcatcttcatcgagtaggcgtttaacgcatcgtaatcgaagaagcctttgaaaatgtcgtcgagacagtagcgcaggatgttgtccagcaggatcatcggcttgcgtctgcgcggggtttccggcggcaggttcacgaagcgcgggaccttgtcggacgggatctccagcagagcgtagcgaatggattcaccgcgaataatttctacggccagataggtgtagtcatctttcaggaactgcaccagatcggtttcgcggttgatgagaatcggggtaatgtgctggcgcaagtactgtttaaaatagtggcgcagccagttttgttggttaacggaaagctgacgttcgttaatcaggaagatttgattgcgcgccatctccagcagcagttcgttatacaggccgtcaaattcctgatcggctttcaacacgcgggactggattttgcccagcagatgccgcgagtgagagtttaagccctgttcttcactgatgatgatccgtcttttcagctcggcaaagcgaaccttgtagaactcatccaggttgttggaatagatgcccaaaaaacgcatgcgttcgatcagcgggttacttttgtcagccgcttcctggagtacacgttcgttaaatgctaaccagcttagctctttctcgatatataacttttcctgacccattacagctcacactccagttcaatcacaggacgtggtaaatccgtctcgtccttattatggcgagcatttccacgatatgtccaacagtgccagaaaagtatgacagttattttttttgttggggaatttagaaggttggagaagggaatatcgggtaatgcaaggtagatgtcgggtaagcgcggcgccacccgacataacaaactactcttccgccgcatggccctgcgggggtaacttcacgccatccagccaggcagcgccgtcgcgcatttcgaggcgcccgtcgacaaaccagcttaccaccagcgggtaaatggcgtgttcctgggtctgcacgcgttcggtcacgtcttcttcgctgtcgccgtcaaagaccgggactttggcctgcaggatcaccggaccgccgtccagctcgtcggtcacgaaatgcacggaggtgccgtgctcctcatcgccgttttccagaacctgacgatgggtgtgcaggccgggatatttcggcagaagagaagggtgaatattcagcagacgtccggcgtagtgcgcaacaaaagccgggctcagaatgcgcatatagcccgccagcaccacgacgtccggtgcgtaggcatcaatctcctgaaccagctcgcggtcaaaggcttcacgcccggcgaactggctggcttccagcgcgtgcgcgggaatgttcgcttcccgcgcgcgctcaaggccgaacgcgtcggccttgttgctgaatactgcccgaatggtgccgttgattttcttctgtttgcaggcgtctatgatggcctgcaaattgcttccgttgccggaaatgagcaccacgatgtttttcattcaatgaccacacgctgttcggaatcggaggctttaatcgtaccgattttccacgcgttttcacctttttcggtcagcagtttaaccgctttatccgcttcgcttgccggcagggcgataaccatgcccacgccgcagttaaaggtgcggtacatttcgtgagagctcacgttgcctgcggtctgcagccagttaaacacggctggccactgccatgaggattcgtcgattacggcctgggtgttgtccggcagcacgcgcgggatgttttcccagaagccgccgccggtcaggtgggcgatagcgtgcacgtcaacgttctcaatcagttccagcacgtttttcacgtagatgcgggttggtgccagcaggtggtctgccagcggtttaccgtcaagctcggtggtcagcgggtcgcagccgctcacttcgagaattttacgcaccagagagtagccgttggagtgtgggccgctggaagccagcgcgatcagcacgtcaccatccgccactttgctgccgtcgataatttctgatttttctactacgccgacgcagaagcccgcgacgtcataatcttcgccgtgatacatacccggcatttcagcggtttcgccgccgaccagcgcacagccggactgcagacagccttcggcgataccgttaatgacgctggccgcggtatccacgtccagtttgccggtcgcgtagtaatcgaggaagaacagcggctctgcgccctgaaccaccaggtcattcacacacatcgcgaccagatcgataccgatcgtgtcgtgacgttttaaatccatcgccaggcgcagcttggtgcctacaccgtcagtacccgagaccagaacaggttcacgatatttttgcggcagcgcgcacagtgcgccgaatccacccagaccacccatcacttccgggcggcgggtttttttcaccacacctttgattcggtcaaccagcgcattacctgcgtcaatatcaacaccggcatctttgtagctgagagaagttttgttggtcacggctcaagtccccacgcgattgcatagctagtaagaaaaatcggcgcaattctaacagtccaggcaaacgtttgcgagcctattctcggtgcggggatctttttttctctctggcttatgcagggcgacaaacttgactctgttcacgaaaatgaaaccggtttcggcgttctgcttgcaacggctatcccctttgcacatcatcgaactgaaaccggtttctgtaattgtttttgcagaaaataacgcagaatgagggaaagcaaatgtcaggatttaaagcagattttctgtggggtggtgccgttgcggcgcatcagcttgagggcggctggaaagagggcggcaagggcgttagcgttgccgatgtgatgacggcgggtgcgcacggcgtaccgcgcgaaatcaccaacggcgtgcttgaggggaaaaattaccctaaccatgaagccatcgatttctaccaccgctataaagaagacatcaaactctttgccgagatggggttcaaatgcttccgtacctccatcgcctggacgcgtatcttcccgaaaggtgacgagcttgagccgaacgaagccggtctgaaattctatgacgatctgttcgacgagtgcctgaagtacggcatcgaaccggtgattacgctttcccacttcgagatgcctttccacctggtcacggaatacggcggctggcgcaaccgtaagctgatcgacttcttcgttcgttttgcgaaagtggttttccagcgctatcagcataaagtcaagtactggatgacctttaacgagatcaacaaccaggccaacttccatgaagattttgcgccgtttaccaactccgggctgaagtacgcgccgggtgaagatcgtgagccggtgatgttccaggccgcgcactatgaactggtggccagcgccctggcggtgaaggcggggcgcgagattaacccgtccctgcagatcggctgcatgattgccatgtgccccatctacccgctgacctgcgcgccggacgacatgatgatggcgatgaacgccatgcaccgccgctactggttcaccgacgtccatgtgcgcggtaagtatccgcagcatctgctcaactactttgaacgtcgcggcttcgcgctggatatcaccgaagaagataaagtcgcgctgacgcagggctgcgtggattacatcgggtttagctattatatgtccttcgccaccaaggcgacggcggacaacccgcagctggactatgacgagagcaagagcctggtctctaacccgtacgtgcagaaatctgactggggctggcagattgacccggtggggctgcgctactccctcaactggttctgggatcactaccagctgccgctgtttatcgttgaaaacggctttggcgcaatcgacgtgcaggagagcgacggcacggtgaacgaccagtaccgcattgactacctggccgcccacatccgcgagatgaaaaaagcggtggtggaagatggcgtagacctgatgggttacaccccgtggggctgtatcgacctcgtatctgccggtaccggtgaaatgaaaaaacgctacggctttatctttgtcgataaagacaatgaaggcaacggcacgctgaaccgcagcaagaagaaatcgttcgactggtataagcaggtgattgcgagcaacggcgagcagctataattgcccggtggcgctgcgcttaccgggcctacgggacgtgtaggccgggtaagcgttagcgccacccggcagaacccgcacccaagccggagtctcgcctccggtttttttgtctctaaatcactttgcttgatatacgtcaagcaagatgggtatggcctaatccgaaaaaagcggtataatcccgcgatttttttgcggatgccattcagaggagaaagagaatgaagattgtggaagtgaaacacccactcgttaaacacaagttgggcctgatgcgtgagcatgacatcagcacgaagcgttttcgcgaactggcctctgaagtcggcagcctgctgacttacgaagcgacctccgatctggagacagaaaaagtcaccatcgaaggctggaacggcccggtgcaggttgagcagatcaaaggtaagaaaattaccgttgtgccaatcctgcgtgccggtctcggcatggtggaaggcgtgctggagcatgtgccaagcgcgcgcatcagcgtggtggggatctaccgtaacgaagaaaccctcgagccggttccttacttccagaagctggtgtccaacatcgacgagcgtatggcgctggtggttgacccgatgctggcaaccggcggttcaatgattgccaccatcgacctgctgaaaaaagcgggctgcagcagcattaaagtgctggtgctggttgcggcaccggaagggatcgcggcactggaaaaagcgcacccggacgttgagctgtataccgcctctatcgaccagggcctgaacgagcacgggtacatcatcccggggctcggcgatgccggcgataagatctttggtacgaaataatcgaataacgataaataagccgactttgatagtcggcttttatttgaataaaacaccaacaacgatactactcagaggaaaacactatgacgcgccgtgctatcggggtgagtgaaagaccgccgcttttacagactatcccgcttagtttgcagcacctgctcgccatgtttggcgcaaccgtgctggtgccaatcctgttccacattaacccggcaaccgtgctgctgttcaacggcatcggtacgctgctgtacctctttatctgtaaaggcaaaatcccggcgtatctcgggtcgagcttcgcctttatctctccggtgttattgttgctgccgctgggttatgaggtcgcgctgggcggctttatcatgtgtggcgtgctgttctgcctggtttccttcatcgtgaagaaagccggtaccggctggctggacgtgatgttcccccctgcggcgatgggcgccatcgtggccgtcatcggtcttgagctggcgggcgtggcggcgaacatggccggcctgctgccagcagacggccagtcgccggattccaaaaccattatcatctcgctggtgaccctgggcgtaacggtctttggttccgtgctgttccgcggctttatggcgattatcccgatcctgatcggcgtgctggcgggctatgcgctctcctttatgatgggcgtggtggataccaccccgatcgcgcaggcgcactggttcgcgctgccaaccttctatacgccgcgcttcgaatggtttgcgattttcaccattctgcctgcggcgctggtggtgattgcagagcacgtcggccacctggtggtgacggcaaacattgtcaaacgtgacctgatccgcgacccgggcctgcaccgttccatgtttgcgaacggtttctccaccatcatctccggtttctttggatctacgccaaacaccacctacggtgaaaatatcggcgtgatggcgattacccgcgtctacagtacctgggttatcggcggcgcggcgatcatcgccattctgctctcctgcgtcggtaagctggcggcagcgattcagatcatcccggtgccggtgatgggcggcgtgtctctgctgctgtacggggtcatcggtgcctccggtattcgcgtgctgattgaatccaaagtggattacagcaaagcgcagaacctgatcctgacgtcggtgatcctgattatcggcgtgagcggcgcgaaggtgcacatcggggcggccgagctgaaaggcatggcgctggcgaccatcgtcggcgttggcttgagcctcattttcaagctgatctccgtgatccgcccggaagaggtggtgctggacgctgacgaaagcgaaaaagcgtcacagtgatcctttaaccgggcggacgatccgcccggttctctccttgcaggttccgtgttaaactccatgccgattttatgtcagatctggttgaggtacttctgaacggaccggcacagctctctctgccactctatctccctgacgacgaaacgtttgcaagtttctggccgggtgataacccctctttactggctgcactgcaaaacgtgctgcgtcaggaacacagcggatacatctatatctggtcacgcgaaggtgcggggcgcagccatctgctgcatgccgcctgtgcggagctttctgcgcgcggtgatgcggtaggctacgtgccgctggataaacgaacctggtttgtccctgacgtgctggaggggatggaacatctctccctagtctgcatcgataacatcgaatgcgtggcgggggatgagccgtgggaaatggcgatctttaacctctacaaccgcattctggaatcgggcaaaacccggctgctgatcaccggcgatcgcccacctcgacagctgaatctgggcctgccggatctggcgtctcgcctggactggggacaaatctacaagctccagccgctgtcggatgaagataagcttcaggcgctacagctgcgtgcaaagcagcgtgggtttgagctgccggaagacgtgggccgtttcctgctgaagcggctggaccgcgaaatgcgcacgctgttcgacacgctggatcagctcgatcgcgcctcgattaccgcccagcgcaagctgaccattccgtttgtgaaagatattctgaagctatagttgtgccgggtggcggctgcgccttacccggcctacatatggcacccgtaggcccggtaagcgcagcgccaccgggcgaaaccatcagaggatctcgagcacctcttccggcgggcgtccaatgcgcgcctggccgttcgccaccacaatcgggcgctcaatcagctttggattttcaaccatcgcctgtatcagccgatcctcggagagacggtcgtcattcaggttaagcgacgtatacagatcttctttcttgcgcatcagatcccgtgcactgcccatgcccagcatatgcagcagctggcggagggtttgcgcgtccggtggggtgtcgaggtacagcaccacctccggctccacgccgttagacttcaacaggctcagggtatcgcggctcttggagcagcgcgggttgtgataaatttttacggcgtctgtcatgacgtgaattctccttgattacatcttctcgtacggcttgaagcgctgctgcaggccgcgaagctgatcgatacgcgcgtcgtatcgggcctgctggaggctgccgagtttgacctgcgagctggcgctgctgagcgcggaaatggcctgatcgaggcggcccaccagggcaaagccttcggcacgcgccgcgagctcctggtcgcggttgccaagctgggcttccgcctgagcgagcagatcccagccgttttgatcgtctttattgttaaaggtgtaacggttcaggatggtcgccgcttcacccggctggccgccctgcaggtaagcgttcgctaggttaagctgcagcaccgggttggtacggacgtctttcgcccctttcaggcggttaatcgcatcggcaggcttcttctgccccagatcgatatccgtcgacagatcgaggtaccacgggttgttcgggtcggcagccagaagcggttgcagcgctttacgcgcctcgtcgtatttgctggcttccatcgcctggagcgcctgaccatactgcgcggcgtttttctcacgcacgttgcctttcgccagggcatccagcaggtcgctggtgagctggttacgcccggaattgtacatccccagcgttctcactttcgccatgtagaaatcctgcgaagactggaccacgaccgggcgcatctggttggcacggttacgcgcgtccgacagacggctttcaggcagcgggtgcgtgagcaaaatttccggtggacgggaagaataacgcgcctgatcgagcagtttttcgaggaagctcggcatggcctgcgggtcaaagcctgagcgctgtaacacctgaatgccgatgcgatccgcttcctgctcattttgttgggtaaagctgatcatcccctggcgcgtcccggccagcgtaccggtcagcgccgccatcccggcctgcgggctggccatcgccagcagaatggaacccagtgcgcccacccaggtgaggggagcgttacgtttctggtcttccatcgcacgcgccaggtgccgctgggtgacgtgcgaaatttcgtgcgccatgaccgaggccagctggctttcgttgtccgaataacggaataacgccgaatgcagcaccacgttaccgccaaagaaggcgaaggcgttgatttcgtcattattgattaaatagaaatggaagggggtttttaccgagtcggcgtgcgccaccaggcgcattcccagcccgtttatgtactgtaccagcaaagggtcgttaatcagcggggcgctgccgcgcagctggcggacatagtagtcgcccatttgcatctcttgcccaatagagagcgtgcttcctgccgtggtgcccatgtccggcaatgtatcggacgagtcagcaaaagcgggcaacacctgaccgaccgtcaccgcggcaatcagtgttgcaaccagtgtttttctcaactgcctgaacataaccactgtcctgtatgttagatgtgctagtttgaccgatgaaccggcatatcgttcatctctgctgccctgcgagtgtagccgtgttgtagcatgaagaaaatcccattcatcaggcttttgcggattgcgatcgggatacaaaaagcgaaagtcttttttgtgacagttagatacaattcaccctctcactcccgccattcgattcagggaagggttgtatgctcgaaatgttaatgcagtggtaccggcgtcggttcagcgacccggaagccgttgctttgttggttattctggtcgccgggttcggtatcctgttcttcttcagcggcctgctcgcccctttgctggtagcaattgtgctggcgtacctgctggagtggccaacggcgcgcctggagaatattgggtgttcccgccgctgggcgaccagcatcgtgctggtgctgtttgtcggcattctcctgttgatggcctttgtggtgatgccggtagcctggcaacagggaattaacctgatccgcgatatgcccggcatgctgaataagctttctgatttcgccgccacgctgccgcgccgttatcctgcgctgatggatgccgggattatcgacgcgatggccgaaaatatgcgcgcccgcatcatgacgatgggcgattcggtggtgaagtactctctggcgtccctggtcggactgctgacgctggcggtttaccttgtcctcgtgccgctgatggtcttcttcctggtgaaagataaagaccagatgctcaacgccgtacgccgtattctgccgcgcaaccgcgggctggcggggcaggtctgggaagagatgaaccagcagatcaccaactacattcgcggcaaggtgctggagatgattgtggtgggggtcgccacctggattggcttcctgattttcggcctgaactactcgctgctgctggccgtgctggtcggattttcggttttgatcccctacatcggcgcgtttgtggtgaccattccggtggttggcgtggcgttgttccagtttgggctgggtaccgagttctggagctgcttcgcggtgtatctgattattcaggggctggacggtaacctgcttgtaccggtgctgttctccgaagcggtgaacctgcatccgctggtgattatcttatcggtggtgattttcggcgggctgtggggattctggggcgtgttcttcgccattccgctggcgacgctgattaaagcggtcgtccacgcgtggccggatgtgccagcggtagaagagctgtaaattttgccgggtggcgctgcgcttacccggcctatttatccttgtaggtcgggtaaggcgaagccgccacccgacactcactttcaggcactttctttcagccagttcaacaccacgtcgtggtggttgctggttttgaagtcgtcaaacacgtgttcaactttaccgtcagcgtcaatcaggaagctgatgcggtgaatgccgtcgtaggttttccccatgaacgtcttctcgccccagacgccgaactgctcgcatacctgatgatcttcgtcagaaagcagcgtgaagttcagcagctctttttcagcaaatcgtgacagcttttctggtttatcggtgctgatacccagcacttccacgccgacttttttcaactcatccatgttatcgcgtaagccgcaggcctgtacggtgcagcctggggtcatggctttcgggtagaaatagaccagaacacgctgtccctggaagtcggtcaaatttacttgctcgccgtcttgatccggtaagctaaatttcggtgcgatgtcaccggctttcagtggattcattactcaactccatcctgttcgtgctgcgaataattgacgacgcttatactgccctgcgcgtttaattctgtacagagggctttgaacgcttgctcgatatttgacgcatcctgtgacgcaggactgtgcgcggtaatttgaataaagagcgtgggaaccgtgcttgcgtcgcccggctgtgtgcgggaaacgagctcggcgatgttcatctgatggctgtcaaacagcgcggtgaagcgctcaatcagatgtggagaatcaggcacttcaacctgcacccagacggtagaaggcatggccgggcgagggcgcgcggtggtgcgcttcatgacgatcagcaagtccagctcggcacctttcagcggcagggtcgattcaatcaacgtgatggcgttccatgtccctgaaagcaacataatgaatgtgaactcttcgccgagcatggccaaacggctgtcttcaatattacagccgcaactgcttacgtggcgggtgatggtgttcacgatacccggcctgtcggcacccagcgcagtgataaccaggtaatgttgtgatgaggttgtcaaacctgttcttcctttgcatggttaagtcttcctaaggaaagcataaaaaaaacatgcatacaaccgcctgagggcctcaggtcgcttgcttttattacagttccaaacgtaccattgagactcttgttcgcacagaggatggctcatgttcacgggaagtattgtcgcgcttgtaacaccgatggatgaaaaaggtaacgtctgccggtctagcatgaagaagctgattgattaccatgtcgccaatggaacctcggcgatcgtttcggtagggactaccggtgaatctgcaacgctgagccacgacgagcacggcgatgtggttatgctgaccctggaactggctgacggacgtattccggtcatcgcgggcacaggcgcgaatgccaccgcagaagcgatcagcctgactaaacgttttaacgacagcggcattgtcggctgtctgacggtgaccccttactataaccgtcctactcaggaaggtttgttccagcacttcaaagccatcgctgaacatactgacttgccacaaattctgtataatgtgccgtcccgtaccggttgcgatatgctgccggaaaccgttggtcgtctctcggaagtcaaaaatattatcggtattaaagaggcgacagggaacttaagccgcgttcatcagatcaaagagctggtttcagacgactttatcctgttgagcggtgatgatgcgaccgcgctggactttatgcagctcggtggccatggcgtgatctccgtaacggcaaacgttgcggcgcgcgacatggctgaaatgtgcaaactggccgcggccggtcactttgatgaagcgcgtgtcataaatcagcgtctgatgccgctgcacaataaattatttgtcgaacccaatccgatcccagtgaaatgggcatgtaaggagttggggcttgtagcaaccgacacgctgcgtctgccaatgacaccgattaccgaccacggtcgtgatatcgtcagggcagcgctgaagcatgccggtttgctgtaaagtttagggagatttgatggcttattcagtacagaagtcgcgcctggcgaaggttgcgagtgtttcgcttgttatgctgctcgctgcctgtagttcagactcgcgctacaagcgccaggtgagcggtgatgaatcctatctggatgcgaccccgcttgctgaacttcacgcaccggctggtatgatcctgccgattcagaacggcgattataatattcccgtgaccaacggcagcggcctggtcggtaaagcgcttgatattcgtccaccagcacagcctctggcgctggtgagcggggcgcgtacccagttcaccggtgatacggcatctctgatggttgagagcgcgcgcggtagcaccctgtggccgcaggttgtcagcgtcattcaggcgaagaactacaccatcgataaacgcgatgatgccagccagacgttaaccaccgactggatcgaatggaaccgtctggatgaagaccagcagtaccgcggtcgttatcaagtctccgttaaaccacagggttatcagcaggcggttaacgttaagctgttgaacctggagcaggcgggtaaaccggttgcggatgccgcatccctgcagcgttacagcaccgaaatgctgaacgtgattgccgcaggcctggataaaaacgcgaccgatgctgccaacgccgcgcagagccgcaacggtgtgaccttcgatgtccagagcggcgcggatgacaccggcctgccaatgctggtggtgcgtgcaccgtttaaccagacctggcagcgtctgccagcgacgctggaaaaagtgggcatgaaagtgaccgacagcacccgctcaaccggcagcatgacggcaacctataagccgctctccgacagcgcgtggcaggaactgggcgcgaaagatcctcagcttgcctccggtgactacaagattcaggtcggtgaccttgataaccgcagtagcctgcagtttatcgatccaaaaggtcacacgctgacccagtcgcagaacgatgcgctggtcgctgtcttccaggcagcattcagcaaataaatacgagggctggtgaatccagccctttttattttcgtgctacgcaaacgtgtgcgtggcataatatccccagttttgaacacaaatcatcacaccaggagtaatgaagatgcagaagcaagctgagttgtatcgtggcaaagcgaagaccgtatacagcacggaaaacccggatctgttggtgctcgagttccgcaatgatacgtcagcaggggatggcgcgcgcattgagcagttcgatcgtaaaggcatggtgaacaacaagttcaaccacttcattatgaccaaactggccgaagcgggtatcccgactcagatggaagcgttgctgtccgatacggaatgtctggtgaaaaaactggatatggttccggttgagtgcgttattcgtaaccgtgcggcgggctccctggtgaagcgtctgggcattgaagaaggtatcgaactgaatccaccgctgttcgatctgtttctgaaaaacgatgccatgcacgacccgatggtcaatgattcctactgcgaaaccttcggctgggtgaacaaagagaacctggcgcgcatgaaagagctgacctacaaagccaacgacgtgctgaaaaaattgtttgatgacgcgggcctgatcctcgttgacttcaagctggagtttggtctgttcaaaggcgaagtggtgctgggcgatgagttctcaccggacggtagccgcctgtgggacaaagaaaccctggataaaatggacaaagaccgtttccgtcagagcctgggtggcctgattgaagcgtacgaagcggttgctcaccgtttaggcgttaagctcgactaactccctcacttgccaaaggatgttcgcatcctttggcgtcttacctttgtttcctatggtaatcttgccgttaaccgcctacgatcatagctattataaatggaatagttcgaggtggttatgcgctggcaagggcgtcgtgaaagtgacaatgtagaagacagacgcagtgatggcggcggcggtccttccatgggcggaccgggcttccgcttacccagcggcaagggcggtatcattctgctgatagtggtgctggtcgcgggctattacggcgtcgatctcaccgggttaatgaccggtcagccgctgcaacagcagcagcattctcagcgctccatcagcccgaatgaagatgaagcggccaaatttacctccgtgatcctcgccacaacggaagacacctggggtcagctgtttgagaagatggggcgtacctaccagcagccgaagctggtgatgtaccggggcgcaacccgcaccggatgcggcaccgggcagtccgtgatggggccgttctactgcccggcggacggcaccgtctatatcgatctctctttttacgatgacatgaaacgcaagcttggcgctgacggcgattttgcccagggctacgtgatcgcgcatgaagtcggccatcacgtgcaaaagctgctggggattgagccaaaagtgcgccagctccagcaaaatgcgtcgcaggctgacgtgaaccgcctgtccgttaaaatggagctgcaggcggactgcttcgcgggcgtctggggccacagcatgcagcagcagggcgtgctggaatccggcgatcttgaggaggcgctgaatgccgctcaggcgatcggtgacgaccgtcttcagcagcagagccaggggcgcgtcgtgccggacagcttcacccacggtacctcgcagcagcgctacagctggtttaaacgcggtttcgacagcggcgacccggcgcagtgtaataccttcggtaaagcgatgtaatgctggcgtttgatcagcagatacgcgagcttgagcgcaccggccatcgtcggctggtggtgctcagcggtgaggcgcagtggacgttgagtcaggcgactgacctgcgtaataccctgccgggagactggctgtggctggatgacaatccctcaaaaaccctcagcggactgctgggacgcgaataccttcacgccgtttttgacgcgcgcgccgggtttgacgtctcagccttcgccgcgctcagcggaacgctgctcgccggaagcctcctggtgctgctggttcctctgcttgctgactgggccgacaggccagacagcgattctttgcgctggagcgacagcgcggagccgatcgccactccacactttgtgcaccacttctgccggacgcttgccgccgattcggatgcgattgtctggcaacagtatcgtcctttgtccgttcccgttgcgccggatttacccgcctggcagcctgccagcggcgcaccgcagcgcgagcaggcggagatcctcgacgcgcttctgaccatgcctgcgggcatcgctgccgtaacggcaccgcgcgggcgcggaaagtcagcgctggcggggatgctgctcaatagcattcaggggagtgcggtggtcacggcaccggctaaaggggcaacggatgtcattgcgcgctttgcgggcgagcatttccactttatggccccggatgcgctgctggcctccacgctgcaggccgactggctgattgtcgatgaagcggctgccatcccgggcccgctgctggagaagctggtgacgcgcttttcgcgcgtattattaaccaccacggtgcagggctatgaagggacgggcaggggattcctgctgaagttctgcgcccgtttcagcgaactgcggcattatgccttatcgacccccattcgctgggtcgccggatgtccgcttgagcggttcgtggcaaatgctctgttatttgatgatgcgcttatcgatcgcaaaccggaaggtgaggttcgtataacgccgctggcgccgcggatgtgggagagcgacccggcacgcgcggcaagcgtatatgaactgctgtgtgctgcacactaccgcacgtcaccactcgatttacgccggatgatggacgcgcccggccagcactttgctgttgcagagacgggggctgatattgcaggcgcgctctggctggtggaagagggcgggttgtcaccggagcttagccgcgccgtgtgggcgggataccggcgtccacgcgggaatctcgtggcgcagtcgctggcggcgcacggcggctctccgctcgcggcgacgctgaaagggcgacgggttagccgcattgcgattcaccccctgcgccagcgggaaggcatcgggcaacggcttatccgtagcgccagcggggaagattatctgtcggtgagttttggttttaccgacgagctgtggcgtttctggcagcggtgcgggtttgtgctggtgcggatggggagccatcgggaagccagcagcggctgctacacggcgatggcgctgctgccgctgagcgaggccgggcgtcggctgtgcgcgcaggaacatcaccgtttatgccgggatatgcgcgtcctgtcggcctggaacggtgaaaagatcccggtggacgacggctgggaagctacccttaatagtgatgactggcgggagctggcggggtttgcttttgcccatcgcgcgttttcaacctcggttgccgcgctgacgcggttgttgctcaccgttgatatgccgcttccggccctgcgggggaaactagcagggaaaacggatgagctcgggcgaaaagcgttgctggcaaagctgcgctctgaaaccgcgcaagcgcttgaaaccattgattatccgcgcagccagcagttgaaggaagccattttgcaatggcaattttttcaatgacttcttcagtaaagtggcatggtcattcccgccgggaggcgtagaatccaggtcatctattaaggagaccaccatgaaacatgaccattttgttgttcaaagccctgacaaaccggctaaacagttactgcttctgtttcatggtgttggcgataatgccgtcaatatggggcagattggcagctggtttgcgcccgttttcccggaagcgttgattgtcagcatcggcggcgtagagccatgcggcccgaacgggcgccagtggttctcggttcagggcgtgacggaagagaaccgtcaggcgcgtatcgacgccatcatgccgacctttatcgacgtcgtccgctactggcagcagcagagcggcgtaggagccgaagcgaccgcgctgattggcttctcgcaggggtcaatcatgtcgctggaaagcgtaaaggcgcagccgggtctggtttcacgggtgatcgcctttaacggccgttttgcgacgttaccgacaagcgcaaccacgcagaccacgatccacttaatccacggcggtgaagaccgggtgattgagctctcgcatgcggttgctgcccaggaagcgctgatgcgtgagggtggggatgtgacgctggatatcgttgacgatctgggccacgccattgacgaccgcagcatgcagtttgcgcttgaccatctgcgctataccgtaccgaagcactactttgatgaagcgctcagcggcggtaagccggatgacgatgatattgttgagtttatgtgattcttccccctctcccatggagagggggaatcggatcgattacttcttctgatccttcttcggccagtcgtcgtcatcgtcccacttgtcgttgaaatcacggtgcgggggaagatccggcttgttggcgagaaattttttatggtccacgcgcttaaggtctttaatcacgttcagcagtacgccgaccagaaaaaccaacaccagaacccaccagtactttgaaagccaatccattcgctattcctctcagagcgttcgtcaggcgacgatttgctccataatacgttgatacatacgggccagcagttgtaaatctgccgcattgacacactcatttattttatgaatggttgcgttcactggccccagttcgacaacctgagcacccatacgggcgataaagcgtccgtctgaggtaccacccgttgtcagcagctgtggcttaatttcattatagtgctcgatggcgttcaccaccgcatccaccagtttgccacgctgcgtcaggaacggctggccggaaagccaccactccacggtgtagcgcagctgatatttttccagcagggcgataacgcgcgtcttgatcatctcatcggtcagttccgtgctgaagcggaagttgaactggacgacgtaatcccccgggatcacgttattgctgccggtaccggccttgacgtttgctatctgcatgctggtcggcgggaagaactcgttgcccttatcccactcaatcgccaccagctcgctcagcattggcgcggcgcggtgaaccgggttatcggcgagatgcggatacgcaacgtggccctgaacgccgtgaatggtcaggttacaggtcagcgagccacggcgtccgtttttgacgacgtcacccaccacttcggtactggacggctcaccgaccaggcagtagtcgagacgctcgttgcgtgccatcagcgcttcgacgaccttcacggtgccgttgtgcgcgctggcttcttcgtcggaggtgatcaaaaacgcgagacggtttttgtggttgggatgctgcgccacaaagcgctctgccgccacgaccatcgccgccagagagcctttcatgtctgccgcgccgcgaccaaacagcatgccatcgcgaatggtcggctcaaacggcgggttaatccagcgatccgcgtcaccggcgggaacgacgtcagtatgcccggcgaaggccagcgtttcgccctgtccgcgccacgcccagaagttctgggtatcgccaaaatccatgcgttcaacggtaaaaccaatggcacgcaggcgttcaatcataagagcctgacaacctgcgtcgtccgggctaagggaaggacggcgaataagctgctgagtcagctcaatgaccgggcatgacataaactacacctcaacgaaaaaagtcggaataaagggtttcactgaaacccagcagcataggctgccctggcgcgcagagcaatgggcgtttgataattgccggcatctcgagcatcagttttgccgcgctgtcagcatcggtgatgctggcgcgcagagagtcgtccagtttacgccaggtggtaccgcgggtattcagcagggcttcccagcccagttcgcgaatagcgctatgcagaaattctgcatcgagcccatcggcacggtaatcgtggaagcggtactccacgctgtttgcttccagccagcggcgggcttttttgatggtgtcgcaatttttaatgccgtacatcacaaccatggtgaatccttttgatgttctgataattaaatgttcagtaaattcgaagatatatccttaagtggaatataacacattcaggaattgtctggattaataggtcttcttaattcgactcacaactgtacgctgaatattctttcatcatttaagcatagatgtccattaactttaaaaatccaataaactcagccaataaaataaaactcacccgttcgtagggttatttcagaatattgctggccgtcacaaaaaattgagggctctccgttcatatttatcataaatccccgcaggacgtagggtacaatcacagcaattggttaaatagtcttcacaatgatggtacgtttttgtagaatgcgcataataataagagaggttgttatgattgaacgtgaactggggaactggaaagattttatcgaaggcatgcttcgtaaatgacattcagtaagaattgcaagagcactaaaataagtaaaataaccatagtgtgaattaatcacacagtaaaaaggcggccgataaagccgcctttttttatttcaaccacttactcaggacgttcctttagcgggaagcggcgacgcaccagtacaaagaacagcggaacgaagtaaatggccaggatggtggccgaaatcatgccgcccatcacccccgtgccgacggcatgctggctgctggaacctgcaccggtgctggtcgccatcggcagtacaccaaaaataaacgccagcgaggtcatcaggatcggacgcaggcgctgacggcaggcgtgcagcgtggcggccatcagctcgtggcctttggcattcatctcgttagcaaactcaacgatcagaatggcgtttttcgccgacagcccaatgacggtgagcaggcccacctggaagtagacatcgttctccaggccgcgcatccacgttgcgagcagcgcaccgataaccccaaggggcacgaccagcatgaccgagaacgggaccgaccagctctcatacagggcggcaaggcagaggaagaccaccagcagagagagcgcgtaaagggcgggggcctgcgccccggagagacgctcctggtaagacatggccgtccactcgagaccaaaaccggcgggcagctgttgcaccagtttttccatggtgtccatggcggtaccggtgctgacgcccggcgcggcttccccgacgatttcaaccgcagaatagccgttatagcgttccaggcgtggcgatccgctctcccagtgcgaactggcaaaggcggagaacggcaccatgccgccagcattatttctgacaaaccagcggttaatatcatccggcagcatgcggaacggcgcggcggactggacatacacttttttcacgcggccgcgatccataaagtcattcacatagctcgacccccacgccgtttgcagggtgtcgttgatatcgttgatcgacacacccagcgcctgcgccttacgctgatcgatatcaacctgaagctgcgggctgtcgtcgaggccgttatggcgaacgcgggtcaggccgggatcgttgcctgccagcgctaacagcttatcgcgtgcggccatcagcgccgtgtggcccgccccggcgtgatcctgcagctccatatcaaacccggctgaactgcccaggccgcttatcgccggcgggctgctggcaaagacgcgcgcttctttgatgtgcgcaaaggcttttgtcgcacgttcaatgatggcaaacgaggtgcccgtccgggtatcgcgttcgtcccagtccttcaggcggacaaacatgcgggcaacgttctgcccgtttccgcccgggccggaaccgacggtggagaagaccgagacaacgttatctttctctttggtgaagaagtactgctccactttctgcaccacttttagcgtctgctgctgcgttgcgccgctcggaagctgcaccgaggtggtgaacatcccccggtcttccatcggcaggaacgaggtgggcaggtgcaggaacagccacaccatcccgcccagcagcacaacgtaaatcatcatccagcgcaggctgcggtgcagtacgcgaccaacggcagattcatagcgcgcggcgttgcggttgaacatccggttaaaccagccgaagaaccctttctgtccgtgatgctcccctttgtgcagcggtttcagaatggtggcgcacagcgcgggggtgaggatcagcgcgaccagcacggagagcaccatcgccgagacgatggtgatcgagaactggcgataaatcgccccggtggtgccgccaaagaaggccatcgggataaagacggccgacagcaccatcgcaatcccgaccagcgccccctgaatttgccccatggacttgcgcgtcgcctggcgcggtgagagcccttcttcgctcatgatgcgctcgacgttttcaaccaccacgatggcatcatccaccagaaggccgatcgccagcaccatcgcaaacatcgtcagggtattaatgctgtacccgaaggcgtagagcaccgcaaaggtccccagcagcacgacggggacggcaatggtggggatcagcgtcgcgcggaagttttgcaggaacaggtacatgaccaggaacaccagcgcgatggcttccagcagggtcttcaccacgtcctcaatggaggctttaacgaaggaggtggtttcataggcgactttgtactccagtccgtgcgggaaatactgcgacagctcgtccagacggtctaataccagttttgccgtcgccatttcgttcgcgccggaggccagcttaatccccagaccggaggcctgattgccgttaaagcggctcaggtagtcgtatttctccgcccccatttccaccgtggcgacatcgcccagacgcacttccgacccgtcctgattcacgcgcagggtgatattgcggaactggtccggcgtctgcagcagggattgcgaattaatggtggcgttcagggcttgcttatcaacggaaggcgttccccccagttgccctacggcaatctgggcgttctgggctttgatagcatccgtcacgtcggttgccgtcatctggtagctgttcagcttgttgggatcgagccagatacgcatggagtactgtgagccgtaggcgtcgatatccccgacgccgttgatacggctgatgggatcctgaatattactggcgacgtagtccgcgatgtcctgtttatccatcgagccatctgtcgagacaaacgcgatggtcaatatgttggtatcgccggttttacgcacggtcacgccctggttttgcaccgcctggggcagcttgcgcatcgccgactgcagctggttttggacctgctgcaccgcttcgtccgggtcggtgcccgccttaaagctcagggtcaccgtcgcctgtcccgtggcgctgctttgcgaggacatgtacatcaggttatccagacccgtcatgttctgctcgataacctgcgtcacggtattttccagcgtctgagcggacgcgccggggtagtttgcggtgacgcgcacgttcggcggtgccaggtcggggtattgctcaacgggaagtgaagtaatcgccaggacacctgtcagacacaacaggatggcaagcacccaggcaaaaatggggcgatcgatgaaaaaattcgccatgaaagtgtgacctcgttttgctgcacgtcattattgtttattgcccgcataactttagcggtaaggcccaggtcaaacgtggagaaataaaggagatagtgtaaattatcatgcgcttttccctgcgcttccctctttaccgttatttacccgttaacggcgtgggcgccggaaacgtcacgctgaccagcgtgccgccgttttgcggctgtgaaaagtgcagcactcctccaagccgctgcgcgcgttcgcgcataatgttcagaccgtagtgtcccggcggctcgctggcctcgccaatcccgatgccgttgtcgcgaatgctgacgctgtgcgtaccgtccgctgcggtcacgcagctcacggtgatctcgctggcctgcgcgtgcttaatggcgttcaacaccgcctcacgcacgatctgtaacaggtgcacctgcttttgcgcgtcgagcgccagcgaggagaggcggcagtcgagatgcagtttcgcctgcgtctggctctgcaggacatcgagtgactcctgcagcgccgcgggtaaattcgcgtggttcaacgtcaggcggaaggtggtcagcagctcgcgcagctgctgccaggcattgttcagctcgcgggagaagtcggtgataatggcctgcgcttgggtattttcttccggcacggcgcgtttaagcagcgcaagctgaatgcgcagatacgacagcacctgcgccagcgaatcgtgcagctcgcgggcaatggtggcgcgctcttccatcagcagcagctgctggtaatgcttttgcgcctggttaaagtacagcccgcgcccgagcatggtcgccacgcttctcatcagcggaagggggacgctgtccgcctcgctttgccagcgcagctcgccgtagagcgtgtcctgcatcagtaccggcaggttttgcagagggataccctcagcctccgtcccttcgcacagccgccagtcgtcgctggtgcgcagttccagataattcatctgcgtatagtcatggacaatctgcaggatatgccggaaacagtggctgtcaatctggccggtattgagcgcctgcgagcacttgaacagcatgtcgagctgctggtgggcttcgtgcaggtgccgcgtcttttccgcaaccgaggcttcgagcgaacggtagagcgtatcaagctcggctgacatgtggttaaaggcgcgcgaaagctggcccagctcgttcggcagggcgctatccggcgcaggggtggcaaactcgccgcgctcaatgcgttcgctggccgccaccaggttgttcagcggcagcaccacctggcgacggatgcgacgcagggtaaacagcgtcagcagcaggatcccgattgcgccagccagcgagagcagggtgaccgtttgaattttatgttcggtgtagtgctggagggcgagcacaaaggcatcaatgcggccgacaaaatcctcaatattgcgttggtaccacgcgctgtcgccgcgggcgatatgcgcatccatctcctgccaggccacatgcagctgctgatagcgtgctttcacattgtccgggacgtaccagcggtccagcttctgcagggcaggcgcgccgagcgtctgttgccagctctcgcgatgtgccgcaagggaagggctgttgcgctgcatctcgtagcccagacgatagctctgcatgcgcagtgagccagcgatgttgatggcttcggcatcgcgctggctgctggccagcgtcagcaacgcgacggtgctgctgagcacggatagggcaatgatcgaaaagaaagcccaggcaaggcttccggaaacgggtcgtttaacggtcacagaacggctctctgaataaaattgatctgccacaggttcactggaaataattgggcgcttcaggcatttgaacattgcccgaacgcaccgtgatgcgtaaataccatactcttataaagagaaaggttattgaaccaaaaacaggtgtggttatgaatcgttttattatggctaacagccagcagtgcattgggtgtcgcgcctgcgaagtcgcctgcgtgatggcgcacaacggtgagcagcatgccctgagcgagcgccattttcatccccgtatcacggtcctgagatccggcgagaagagccaccccgtgacctgtcatcattgcgaaaatgcaccctgcgcgcaaagctgcccgaacggcgccatcagcaaatgcgatgacagcgtacaggtgaatcaacaaaaatgcatcggctgtaaggcctgcgtggtggcctgcccgtttggcacgatggagattatcgtcactccgctcgacaatagcagcgtgaaggcctcggcgaataaatgcgatctctgtctgacgcgtccacacggcccggcctgtatcgaaaattgcccggcggatgccctctccctggcgacgcccgccgcgctggaaaacctggcgaaatcgcgccgacagcgcacggcctgcctggaggcgcagccctggcatggtgccgaggccgtcagcgtggacgcgccgcgtactaaactgcagcagatgcaaacgaccccgccccgcggcgagcccgacaagctggctgccgcagagcgcgtgggccattttaacgaaatttacctgccgttccgggccgaacaggccgcccgcgaggtgtcgcgctgcctgaagtgcggagagcacagcatttgcgaatggacctgcccgctgcacaaccacatcccgcagtggattgagcgcctcaacgcgggggatatcaccggcgcggccgagctttctcatcagaccaactgtttacctgaaattaccggtcgcgtctgcccgcaggaccggttatgcgagggagcctgcacgcttcgtgacgcggcgggggccgtgacgatcggcaacatcgagcgctacatctccgatcgggcgctggcgatgggctggcggccggatatgtccgccgtcacgccgtcaggtaaacgtgtcgcgattgtcggcgcggggcccgccgggctggcgtgcgccgacgtgctggcgcgccgcggcgtgagcgtgacggtctatgaccggcatccggagatcggcggtttgctgacctttggcatcccggcatttaagctcgataaatcgctgctcgcgcggcgcagagagatctttaccgcgatggggatccgcttcgagctgaactgcgaggtgggccaggacgtgtcgatgtcgcagctcaagagcgattacgacgccctgtttattggcgtgggtacctatcgttcgatgaaggcgggtattccgaacgaggatgcgccaggggtctacgacgcgctgcctttcctggtgggcaacacgcggcatgttatggggctggaggcgacggccagcgagccgttcatcgacacccgtggcctgaacgtggtggtgctgggtggaggcgataccgcgatggactgggtccgcacggcgttacgtcacggcgcggcgacggtcacctgcgcctatcgtcgggatgaggccaacatgccgggctcgaagaaagaggtgcagaacgccagagaagagggggcgtcatttgagtttaacgtccagccggttgagctgacgctggatccgaacggtaaggtcaacggtatccggatgctgcgtaccgcgctcggtgagccggatgcgcaggggcgtcgtcggcccgttccggtggcgggcagcgagtttgtgatggccgcggatgcagtcatcatggcgtttggctttaatccgcacgcgatgccgtggctgcaggcgcagggtgtcgaaacggatgactgggggcggatcgtggcctcggtcgagagccgctaccgttaccagacgaccaacccgcagatcttcgccgggggcgatgcggtacgcggcgcggatctggtcgtcaccgcgatggcggaagggcgtcatgccgcgcaggggatactcgactggctgggagttgatgtcccacaacatcattaatccggcggacgacaaagcgggattcacggcgtagtataggacgactcattgtgccgtggagcccgtatgaccctgaaaattgacgttatcaaagacaaaattctctctgaaaactactttgtcctgcgtaacatcacctatgatcttacacgtaacaacggtgaagtgatccgccacaagcgcgaggtctatgaccgtggtaacggagcaaccatcctgctctataaccgtgaaaagcagagcgtggtgatgatccgtcagttcagggtggcaacatgggtcaatggcaatcctgacggacgtctgattgaaacctgcgcgggcctgctcgatgacgatgagccggaagtctgcatccgcaaagaggccgtcgaagagaccggctttgaagtgggcgaggtcaaaaaggtcttcgagctgtacatgtccccgggcggcgtgacggaaattgtccatttcttcattgctgaatacagcgacgcacagcgcacgcaccggggcggtggcgtagaggatgaagatatcgacgtgctggagcttccttttgcccgagcgctggagatggtgcgttcaggcgaaatcagggatggtaaagcggtgatattgctgcagtatttacagacaaccgggctgatgaacacccctttagaacggatatagcctgtttttcaggtatatctgataaatccgattgagcaaccccggcgtgaacacgaagatactgccctgttatgcgttttcgttccgggattgtgtcattcatgcgctacagcgtctttttattttccctgttttgtgtgctcatcgcgccgcaggtgcgggctgcacccgcgcagcaagccttctctgactggcaggtgacctgcaataaccagaacttttgccttgcccgcaacacgggcgaacaccgcggtctggtcatgacgctcacccggagcgccggggcgaaaacggatgccacgctgcgtatcgatctcggcggtcttgataccccctccgtgaaagagccggatattgccccgcggctactgctggataatgtccccctgaagctcgacaaacagcgctggcagctcaccccctggcatctgaaaacggacgatgcggccaccatcaccgcctttctgaaaaacatccaggaagggaaggccctgacccctcgcggcggtaagcaggtgatatctctgagcggtctgaaagccgcgctgctgttcattgatgcccagcaaaagcgcgttggcagcgaaaccgcgtggatcaagaaaggtgacgatccgccgttaagcgtgccgcccgcacctgccctgaaaaaggtggcgatcgttaatcctaccccaacaccgctttcccacgctgaactgaacgatctgctggattatggtaccggcaggatgaacagcagccagtgctcgctggatcctaaccgtcgcgaagtgcgcgtcaccgcgttaaccgatgacaaagcgctgctgattgtcagctgcgaggcgggggcctataacacggtcgatctggcgtggctggtgtcacgtaaaaaaccgttctctgcccgcagcgtgaggctgcgtctgccgtttacgccgtcaagcgacagcagcgaaatcgagttgatgaacgccagctttgatgaaaagacgcgcgagctgaccacgctctcgctggggcgcggtatgggggattgtgggatccagacgcgctggcggtttgacggccagcgtttccgcctggtgcgctatgccgaggaacccagctgtgataactggaacgggcctgacgcctggcccacgctgtggatcacgcggtagctttttgccgggtggcgctgtcgcttacccggcctacggtttggtggttttgtaggccgggtaaggcgtagccgccacccggcaacgcagaccgcactaaatcacgctcagcgctttctccaccacgttctcaaccgtaaagccaaagtacgggaacagcttgtcggcaggggcggactcaccgtagccccgcatcccaacaatcgcccctttgagcccgacatacttgtaccagtagtcggcaataccggcctccaccgccacgcgcgccgcgacgttagagggcagcaccgattcccggtacgcctcgtcctgggcgtcaaagatatccgttgagggcagggacaccacgcgcaccgcgtggccttcggcggtcagtttttccgccgctttcaccgtgatttccacctcggaaccggtcgcaatcaggatcacgtccggcttgccgccgctgtctttcaggatatagcccccgcgggcaatgtttttcacctgctccggcgtgcgctcaatctgcgtcaggttctggcgtgacaggatcagcgccgtcgggccgttatggcgttctaccgccagcttccagcccactgccgcttcgacctgatcgcaggggcgccaggtgctgaagttgggcgttaaacgcaggctcgccagctgttccaccgcctggtgggtggggccgtcttctcccagaccgatagagtcgtgggtatagaccataatctgccgcgccttcatcagcgctgccatgcgcgccgcgttacgggcgtactcgacgaacatcaggaaggtggcggtgtagggcacgaagccgccgtgatgagcgatgccgttggcgatcgcggtcatcccgaactcgcgcacgccgtagtggatatagttcccggcaatatcctccttcagcgatttcgagcccgaccagatggtcaggttactcggtgccaggtccgccgagccgcccagcagctcaggaaggagagggccaatcgcattcagggtgttttgcgacgccttacgggtggcgatttttgccgggttggactgcaggttttcaatcagcgcctgggttttatcgtcccagtcctccggcagaccgccgctcatgcgccgggaaaactcggcggccagttccgggtacgcttttttgtaggcggcgaatttctcgttccaggcctgctgggctttctcaccgtcttcacgggcatcccacgcccggtagatctctttcgggatttcaaacggcgggtatttccagcccagcttctgccgggtcagcgccacttcttcgtcacccagcgccgcgccgtgcgcctcttctttgcccgccttgttcggcgagccgaagccgataaccgtgcggcagataatcagggacggtttgtccttcacgctctgcgcttcctgaatcgcttttttcaccgcctcaggatcgtggccgtcgatctcgtgcaccacgtgccagtggtaggcctcgaagcgttttgccgtgtcgtcggtgaaccagccctcggtttccccgtcgatggagatgccgttgtgatcgtagaagccaatcagcttgccgagccccagggtgcccgccagggaacagacctcatgggaaatcccctccatcaggcagccgtcacccataaacacgtaggtgtagtgatcgacaatctcgtggtccggctggttgaactgtgccgccagcgtacgctcggcaatcgccagcccgaccgcatttgccagcccctgaccaagcggcccggtggtggtttccacgcccggcgtatagccaatctccgggtgccccggggttttggagtgcagctggcggaagtttttcagctcctcaagcggcagatcgtaaccggacaggtgcagcaggctgtagagcagcatcgaggcgtgaccgttggagagaataaagcggtcacgatcgtaccaggtgggatcgttagggttgtgcttcaggaagtcgttccacaggacttcggcaatatcggccatgcccatcggtgcgccgggatggccagaattggctttctgcacggcatccatgctgagggcgcggatggcattggcgagctctttacgggacatagttcactccgtggcaaggttaaagtttggcagcgagaagatcttcaagtttgcgctggtcgacagcgaacaggcggataccttccgccagtttttccacggccatggcgtcctgattgtgctcccagcggaattcggcttcggtcatggctttcggttttggcagaacggtagaggtggggatcagcttgcggatgaccgtctcttctttatcctgtagctcctggagcaggttaggggagatggtcaggcggtcgcagcccgccagggcgaggatctgctcggtacggcggaagctggcccccatcacgatagtttcgtagcgatgctgcttgtagtagtcgtagatattgcgaaccgatttcacgcccgggtcctcatccaccacgtacggatccatcggctgtttcgcctggtaccagtcgtagatgcggccaacaaacggtgacaccaggaacacgcccgcttcggcacaggcgcgcgcctgggcaaaggagaacagcagcgtcaggttgcagtgaattccctctttttccagcacctctgccgcgcggatgccttcccaggtcgacgccagcttgatcagaatgcgtgatttatcgatcccctgctcctggtagagttccaccaggcggcgagccttgttgatgctcttttctttatcgaacgagaggcgtgcgtcaacttcggtcgagacgcgtcccggaatgcttttaagaatttccgcaccaaaattaactgccagcttgtcgctggcttcggcgacctgctgttcctgcgtcttcccgcgctgttttccgtaggcaatggcgtcatcaatcagatgactaaaatgggtaagcccggctgccttgagcagtagcgaagggttggtggtcgcatcctccggctgatagtggcgaatcgactcgatatcgccgctgtctgccaccaccgtggtgaattgtttgatgccgtctagctggttcataaatgattactccttggaaataaaagcgttagctgagtgcgttagttcacacttctgagaaaatcatgatggacttaacaaaaaagcatagcagacgggggaggcattgcttttgagacgggtaacatggctgttataaattgataacaatttttaatgtgtgatggtgagagtttggcagccttcaaagtttaggaggcggcctgaggcgatactaggcggcacaccagggtgtgcaaccggatcgttttcgtcacccttttgaccgatacgtgaaaggaaaaataagatggatgagcagttgaaacagagtgccctcgattttcacgagttccctgtcccgggcaaaattcaggtctccccaaccaagccgctggcgacacagcgcgatctggcgctggcctactcgccgggcgtggcggccccgtgtctggaaatcgaaaaagatccgctggcggcctataaatacaccgcgcgcggcaaccttgtcgccgtgatctctaacggcacggcggtactgggtctcggtaacatcggcgcgctggccggtaagccggtgatggaaggcaagggggtgctgttcaagaaattcgccggtatcgacgtgtttgatatcgaggtggacgagctcgatcctgacaaattcatcaacgtggtggccgcgctggagccgaccttcggcgggatcaacctggaagacatcaaagcgccggaatgtttctatatcgagcagaagctgcgcgagcgtatgaacattcccgtgttccatgacgaccagcacggaacggccattatcagcaccgccgccattctcaacggcctgcgcgtggtagagaaaaatctctccgacgtgcgcatggtggtctccggcgctggcgccgcggccatcgcctgtatgaacctgctggtggcgctgggtatgcagaaacacaacattgtggtctgcgactccaagggcgtgatttacaaagatcgcgagccgaacatggcggaaaccaaagcggcgtatgcggtagaagacgacggcaagcgcacgcttgaggacgtgattgacggcgcggatatcttcctcggctgctcgggtccgaaagtgctgacccaggagatggtgaagaagatggcgcgcgcgccgatgatcctggccctggcgaaccctgagccggaaattctgccgccgctggcgaaagcggtgcgtgaagacgccattatctgcaccgggcgttccgactacccgaaccaggtgaacaacgtgctctgcttcccgttcatcttccgcggcgcgctggacgtcggcgcgacggcgatcaacgaagagatgaagctggccgcggtgcacgccattgcggagctggcccacgccgagcagagtgaagtggttgcctcagcctatggcgatcaggatctgagctttggcccggactacatcattccaaaaccgttcgacccgcgtctgattgtcaaaattgcccctgcggtggcaaaagcggcgatggattccggcgtggcgacgcgtccgattgaagacttcgacgcttacgtcgataagctcaccgagtttgtctataaaaccaacctgttcatgaagccgatcttctctcaggcgcgcgccgacgcgaagcgcgtggtgctggcggaaggggaagaggcgcgcgtgctgcacgccacccaggagctgatcaccttaggcctggcgaaaccgatcctgattggtcgtccgagcgtgattgaaatgcgtatccagaagctgggcctgcagattaagccgggcgtcgacttcgagatcgtcaacaacgaatccgatccgcgcttcaaagagtactggagcgaatactacgcgatcatgaaacgccgggggatcacccaggagcaggcgcagaaagccgtcatcagcaacacgacggtgatcggcgcgatcatggtccatcgcggcgaggcggatgcgctgatctgcggcaccatcggcgactaccacgagcactttagcgtggtgcaggagatcttcggctatcgcgacggcgtccataccgccggggcgatgaacgccctgctgctgccgagcgggaacacctttatcgctgacacctatgttaacgacgatccgagcccggacgagctggcggagatcaccgtgatggccgccgagaccgtgcgccgcttcggtatcgagccgaaggtggcgctgctgtcgcactctaacttcggttcgtccaaatcagcggcggcgtgcaaaatgcgtgagacgctggcgctggtgcgcgagcgcgcgccggagctgatgattgacggggaaatgcacggtgatgcggcgctggtggagagcatccgcaacgaacgtatgccggacagcccgctgaagggatcggcgaacatcctgattatgccgaacgtggaggcggcgcgtatcagctacaacctgctgcgcgtctccagctctgaaggggtgaccgtaggaccggtgctgatgggcgtggcgaagccggtgcatgtgttaacgccgattgcctccgtgcgccgtatcgtgaatatggtggcgctggcggtggttgaggcgcagacgcagccgctgtaagcattgtgagtcgggtggcgcgttcgcttacccgacctacaggttgagtaggccggataagcgtagcgccatccggcagttaaacccagtcgcgtactttaaggaactcactcaaggcagcctccgggctgccttcttttggctcgtagcagtactcccagcgcaccagcggcggcatcgacatcagaatcgactccgtgcgcccgccggtctgcaggccaaacagcgtcccgcgatcccataccaggttgaactccacgtagcgcccgcgacggtagagctggaactcgcgctcgcgcacgccatagctggtgtctttacggcgttcgacgatgggcaggtacgcgtcggtatagccttcgcccaccgcgcgcataaagctgaatgcggtatcaaaatcaggcgtgttgagatcgtcaaagaacagcccgccgatgccgcgctgctcgtcgcggtgcttcaggtaaaagtagtcatcgcaccactttttaaatttcgggtaaatgtcttcgccaaacggcaggcaaagatcccgcgcggtgctgtgccagtgcacggcatcctcttcgaagccgtagtagggcgtcatgtcgaaaccgccgccaaaccaccagaccggatcggcccccgctttttccgcaatgaaaaagcgcacgttggcgtggctggtcggcacaaacggattgtgcggatgcaccaccagcgaaacgcccatcgcttcgaagctgcggcccgccagctcaggacggtgtgctgtcgcagacgcgggcatcgcgtcgccatgaacgtgggaaaaattcacgcccgcttgttcgaagatgccgccgttacgcagcacgcggctacgcccgccgccgccggcttcgcgctgccagttgtcttcctgaaattctccgccgtcagcggcggccagtttctggcaaatttcgtcctgcagctgcagcaggaaggttttgaccagttgagcattgggtttcatcagcgtttcctggagtgcgctttttggttatcaaaccagttgaagtaactgataatgccggaggcgatggcgttggcgatcttctgacgaaacgccgtagtgccgaggagtcgctcctcttccgggttggtaatgaacgaggtttccaccagcacggacgggatagacggtgatttcaacaccacaaacgccgcctgttcggtgctcctgctgtgcaggcgatgcactggcttaatcttcttcaggatgtgcgagccgagcgtcaggctgtttttgatcgtatccgtctgcacgaggtcgaacagcacctgctgtagcaggtggtctttgtcggtggcttttttcccggcgacttcatccgcccggttttcgcggtcggagaggtattttgccatggcgctactggcgccgcggttggacagcgcaaacaccgaggcaccggcggcagacgggttggtaaagccgtccgcgtgaatcgacataaacagatccgccccgtgctggtgggcgatctctacgcgatcgtacagcggaataaaggtgtcgccagagcgcgtcagacgcgcgtcaatgccgttgctgcgtagaatcgcccgcacattttttgcaatcgccagcacgacgtgtttttctttcgacccgtttttgccgatggcgccggtatcaataccgccgtggcccgggtcgagcatcaccaggcgctttgcgcccggctttttggttttcggtttgctgtgtccgttactggttttaagcgcgctctcgtcttttgcctgagcctgctttgcgatgcccgttaacgttaaggccgccagccccgctttgagaacctgacgacgcgatgtgagtgcttttaatggtttgaatgtgctcatgcggcctgaatactaaaaaatggggtcctggtgttatatcgtatcgcgtttagcgttacgacagtccttattgagaattgttttacttttcatttcaatacgtgacaaagtgacattatgccaaattttggcgagattttccccggttattggctaaaggcgtggttcgcgccataatcactgtttttaaacccgaaaaggcggttaataccatggagatacgcgtttttcgccaggaagatttcgaagaggtgatcaccctttgggagcgctgcgatctgctgcgtccgtggaacgatccggaaatggatatcgagcgtaaggtgaatcacgacgtcagtctgtttctggttgcggaagtcaatggcgaggttgtggggacggtgatgggcggttatgacggccatcgcggctcggcctattatctgggcgtccatccggaataccgtggtcgcggtattgccaatgcgctgctcaaccggctcgagaagaagctgatcgcccgcggctgtccgaaaatccagatcatggtgcgggaagataacgacgtggtgctgggcatgtatgaacggctgggctacgtacacgcggacgtgctgaatttaggaaagcgtctcatcgaagatgaagagtactgagatccatccggcagattatgacgcgcagggtcgcgtcaggctgccctttttattctggtgcgttctgctgcttcaggcccgcacctgggtgctgtttgtgatggccgccgcgtcgcgcgggcagggcgacacgctgctaaatctcttttatcccgatcacgatgccttctggctcggcttgctgccgggcgtaccggcggtggtggctttcttgtgcagcggtcggcggcacgtaatcccgcgcttgtggcgcgcgcttcgcgggctgctgatccttgcccaaattgcgctgctcttctggcagccggtactctggtggtacggtgaaccgctgacgggcatcggcgttgcgctggtggttgccgatatcgtggcgctgctgtggctgctgaccaacccacgtcttcgcgcctgttttgtgcctcaggatgattaatccggcactttttgccgatgtcgcactccaacaagcgttgatttaacacgtaaggacgtttcaatgaaatcgctgcgtttagttttatgcgctcttccgctggcattgaccggctgttcgacgctctcctccattaactggtctgctgcgtatccgtggaactggtttggctcatcaacggaagtgaccgagcagggcgtgggtaaaattaccgccgcaacggcgctggatcagaatgctattcaggatgcgctcagcagtgactaccgcctgcgcagcggcatgaaaacagagaatggcaatatagtgcgctattacgaggcgctgaagggcgacaagctggcgctggcgatcaacggtgacaaaggcacggtaaaccggatcgcggtgatggatgaagatattccaaccgccagcggcgtgaaggtcgggacgccgtttagcgatctttataagcaggcctttggcaactgcaccagcgtgccatccgacgatgaggtggcggtggagtgtaaggcggaaggcagccagcacatcagctatgtttttaccggcacctggagtggcccggaagggttgatgccgtctgacgacaccctgaagagctggaaggtgagcaaaatagtctggaagcagtaatttgcgtctgaacaaaccgcctcgctgaaatccgggtataatacccgccatcaatgccacgctgacgtggcatctttatttcaggaggagcgatgtctcaggttcagagtggcattttgccagaacattgccgcgcggcgatttggattgaagccaatgtcaaaggggacgtggatgccctgcgtgcggccagcaaagcgtttattgataaactggcgaccttccaggccaaattcccggaagcccacctcggcgccgttgttgcgtttggcaataacgtctggcgtcagctgagcggcggtgaaggggcagaagagctgaaggacttcattccttacggcaaaggccttgcacctgcgacccagtacgacgtgctgatccacatcctttctctgcgtcacgacgtgaacttctccgttgcccaggcggcggtggcggcctttggcgacagcatcgaggtgcaggaagaggttcacggtttccgctgggtcgaagagcgcgatctgagcggcttcgtcgacgggacggaaaacccggcaggggaagagacgcgtcgtgaagtcgcggtaatcaaagacggcgtggacgcgggcggcagctacgtgttcgtgcagcgctgggagcataacctcaagcagcttaaccgcatgagcgtgcatgaccaggagatgatgattggccgcaccaaagaagctaacgaagagatcgacggtgatgaccgtccggtcacctcgcacctgacccgcgttgacctcaaagaagacggcaaagggctgaaaattgtccgccagagtctgccgtacggtaccgcaagcggcacgcacggcctctacttctgcgcctactgcgcgcgcctgcataacattgaacagcagctgctgagcatgttcggcgataccgacggcaagcgcgacgccatgctgcgcttcaccaaaccggtgaccggcggctactacttcgcgccgtccgtcgagcgtctgctggcactgtaaaaccgctttccatacgtaggccgggtaagcgttagcgccacccggcaattttccccgcgccttattcccttttctgcttctaaatcaccaaacggtatataaaaccgttactgctttcatcaccgttataaatattatgactataagatagtcatcacatttataagggtgcgcaatggccgttactgtactgaaaaaaggaactctggcgctggcaggtttactgctggtggcacaggcgcaggcgactgaactgttgaacagttcgtatgacgtctcccgcgagctgtttgccgcccttaatcccccgttcgaacagcagtgggcgaaagacaataacggcgacaagctgaccatcaagcagtctcacgccggttcatccaagcaggcgctggccattcttcagggcctgaaagcggacgtcgtgacctacaaccaggtgactgacgtgcagatcctgcacgacaaaggcaagctgatcccggcggactggcagagccgtctgccgaacaacagctcgccgttctactccaccatgggtttcctggtgcgcaagggcaatccgaagaatatccacgactggagcgacctggtgcgttccgacgtgaagctgatcttcccgaacccaaaaacctccggtaacgcgcgttacacctatttagcggcgtggggcgcggcggacaaggctgacggcaacgataaagccaaaaccgagcagttcatgacccagttcctgaaaaacgtcgaagtgttcgataccggcggccgcggggcgaccacgaccttcgcagagcgcggcctgggcgatgtgctgatcagctttgagtcggaagtgaacaacatccgcaagcagtatgaagcgcagggctttgaggtggttatcccgaaaaccaacattctggccgagttcccggtcgcatgggtggataaaaacgtgcaggcgaacggtaccgagaaagcggcaaaagcctatctcaactacctgtacagccctcaggcgcagaccatcattaccgattactactaccgcgtgaacaacccggacgtgatgaacaagctgaaagataaattcccgcagaccgcgctgttccgcgtggaagatcatttcggctcctggccagacgtgatgaaaacgcattttgccagcggcggtgagttagacaaactgctggcggcggggcataagtaatgtttgcagtctcgaccaaacgcgtgctgccgggctttaccctaagcctcggaaccagcctgctgttcgtctgcctgattctgctgttgccgctcagcgcgctggtgatgcagcttgcgcagatgagctgggcccagtactgggacgtgatcaccaacccgcaggtggtggcggcctataaggtgacgctgctgtcggcgtttgtcgcctccatttttaacggcgtgtttggcctgctgatggcgtggattttgacccgctatcgcttcccgggccgcacgctgcttgacgccctgatggatctgccgtttgcgctgccgacggcggtcgcgggcttaaccctcgcgtcgctcttctccgtgaacgggctgtacggcgagtggctggcgaaatttgacatcaaggtgacctatacctggcttggtatcgcggtggcgatggcctttaccagcatcccgtttgtggtgcgtaccgtgcagccggtgctggaagagttaggtccggaatacgaagaagcggcggaaacgctgggcgccacgcgctggcagagtttccgcaaagtggtgctgccggagctgtctccggcgctgatggcgggcatcgcgctgtcgtttacccgcagcctcggcgagttcggtgcggtgatatttatcgccgggaacatcgcctggaaaacggaagtgacctcgctgatgattttcattcgcctgcaggagtttgattatccggcggcgagcgcgatcgcttcggtgatcctcgcggcatcgctgctgctgctgtactcgattaacactctgcaaagtcgctttggtcgacgtgtggtaggtcactgatggcggaagttacgcaattgaagcgatacgatgcgccccgcatcaactggggtaaatggtttctgattggggcgggcatgctggtttccgccctcattctcgtcgtgccgacgatttatatcttcgttcaggcgttcagcaagggcctgatgcccgcgctggaaaacctggcgaacccggatatgctgcacgccatctggctgaccgtgctgattgccctgatcaccgttccggtgaacctggtgttcggtaccctgctggcgtggctggtgacgcgctttaacttcccgggacgtcagctgctgctgaccctgctggatattccgtttgccgtgtcgccggtggtggcgggcctggtatacctgctcttttacggctccaacggcccgctgggcggctggctggatgcgcataacctgcagatcatgttcgcctggccgggcatggtgctggtcaccatcttcgtgacctgtccgtttgtggtgcgcgagctggtgccggtgatgttaagccaggggagcaacgaagacgaagcggcggtgctgctgggggcttccggctggcagatgttccgccgcgtgaccctgccgaacatccgctgggcgctgctttatggcgtggtgctgaccaatgcccgcgcgattggtgagttcggtgccgtttccgttgtttccggctccattcgcggtgaaacgctgtcgctgccgctgcagattgaactcctgcagcaggactacaacaccatcggcgcctttactgccgcagcgttgctgacgctgatggcgattttgaccctgtttttgaagagtgtggtgcagtggcgtttagaaaatcaggaaaaacgtcagcatcaggagggaaatcatgagcattgagattgccaatattaagaagtcttttggtcgcacccaggtgctgaatgatatctcgctggatatcccttccggacaaatggtggcgctgctggggccgtctggctcgggcaaaaccacgctgttgcgcattatcgccgggcttgagcaccagaccagcgggcacatccgcttccacggcaccgacgtgagccgcctgcacgcccgcgatcgtaaggtgggctttgtgtttcaacattacgcgctgttccgccacatgaccgtgttcgacaacattgcgtttggcctgaccgtgctgccgcgtcgtgcgcgcccggatgcggcaaccattaaggcgaaagtgaccaaactgctggagatggtgcagctggcgcatctggcggaccgtttcccggcccagctgtccggcggacagaaacagcgcgtggcgctggcgcgcgcgctggccgttgagccgcaaattctgctgctggatgaacccttcggcgcgctggatgcgcaggtgcgtaaagagctgcgccgctggctgcgccagctgcatgaagagctgaagttcaccagcgtcttcgtgacccacgaccaggaagaggcgatggaagtcgcggatcgcgtggtggtcatgagtcagggcaacattgagcaggttgacgagccggagcagctctggcgtgaaccggcgacccgcttcgtgctggagtttatgggcgaggtgaaccgcctgcagggcaccattcgcggtggtcagttccacgttggcgcgcaccgctggccgctgggctatacctccgcgcatcagggcccggtcgatctgttcctgcgtccgtgggaagtggacgtgagccgccgaaccagcctggattcaccgctgccggtgcaggtgctggaagcgagccctaaaggtcactacacccaactggtggtacagccgctgggctggtataccgagccgctgaccgtggtcatgcgcgacgacgtcccgccgcatcggggagagcgcctgtttgtcggtcttcagcatgcccgtatttatcacggcaaggaacgcatcgagacgcgcgaggatattgctctggcggagtcagcctgataggttattaggatgtttatcgcccggtggcgctgcgctgaccgggcctacagctaaaactgcgtcttgtaggccgggatcgctgcgcgcaacccggcttttttattgagtaaaaatcgtgaatacactcgaacacaccatcggcaatacccctctggtcaaacttcagcgcatggggccggataacggcagcgaaatctgggtcaaactcgaaggcaataacccggcggggtcggtgaaagaccgtgccgcactgtcgatgatcgtccaggccgaaaagcgcggcgagattaagccgggcgacgcgctgattgaagccaccagcggcaacaccggtatcgccctggcgatgattgcggcgctgaaaggctaccgcatgaagctgctgatgccggacaacatgagtcaggagcgtcgcgccgcgatgcgtgcctatggagccgagctgattctggtgaccaaagagcaggggatggaaggcgcgcgcgacctggcgttagaaatggccgagcgcggcgaaggtaaactgctcgatcagtttaacaacccggacaacccttacgcgcactacaccaccaccggcccggaaatctggcagcaaaccgacgggcgcattacccattttgtctccagcatgggcaccacgggaaccattaccggcgtatcccgttttctgcgcgagcaggcgaaaaccgtcaccatcgttggcctgcagccggaagaggggagcagcattccgggcattcgccgctggccggcggagtatatgcccggcatttttaatgcacagcttgtggaccaggtgctggatcttcaccagcgcgaggcggaaaataccatgcgtgagctggccgtccgcgaaggtatcttctgcggcgtcagctcgggcggcgcggtagcgggtgcgattcgggtagcgcaggcaaacccgggtgcggtagtggtggcgattatttgcgatcgcggcgatcgctatctgtctaccggcgtctttggtgaagagagttattcgcagggggcggggatttaagcgtcatggagatgattctattccgggataatacccgggcgcagcaagccgacattgtcgcggtgcagtctcaggtggtgtacggcagcgtggggaacagcattgcggtaccgaatattcgtacccacaggctgaacgtcaccgccgtgccgacggtactgttcagcaacacaccccactatgacaccttctacggcggcgtgatccccgacgagtggttcagcggctacctgaaggcgctggaagagcgcgaaatcctgcgcgagcttaaggcggtcactaccggctatatgggcagcgccagccagatcgtcctgctggcgcagtggttgaaggcggtcaaagcgcagcatcctgacctgctggtgctggtcgatccggttatcggcgatatcgacagcgggatgtacgtgaagcctgagatccccgaagcgtatcgggagcacctgctgccgctggcgcaggggatcacgcccaatgtctacgagctggaagtgttaagcggcaagccgtgccgcacgccggaaagcgccatcgcggcggcgcaaggactgctctcagaaagcctgaaatgggtggcgatcaccagtgcgccggttgccgacgatccgcaaaacatccacgtggtgctggtctcacgcgagggcgtcaccgtcagcgcgcatccgcgcgtagaaaccgatctgaaagggacgggcgacctgttctgttcagagctggtgagcggcattgtagaggggaaaaccgttgccgatgccattcgcatggccggcgatcgggtgactgacgtgatgctgtatacccagtcgaaaggctacgacgagcttatcctcccggcataaacaaaaatggcgcccgaaggcgccatttttctgtgcggcaagaattacttcttgatgcggataaccggggtttcacccacggtgacgctgccagacagtttgatcagttctttgatttcgtccatgttggagataacaaccggcgtcagggtagacttggctttttcttccagcagtggcagatcgaattcaatcaccgggtcgccaactttcacacgctggccttcttccgcgatacgtttgaagccttcgcctttcagttcaacggtgtcgataccgaagtgaacgaacagttcgataccgctatcagattcgatagagaacgcatggttggtttcaaaaattttaccgatggtaccgtcaactggagcaaccattttgttgccagttggtttgatagcaatgccatcaccaacgattttctcagcaaacactacatccggcacgtcttcgatgttgacgatctcgccggagagcggagcaacaatctcaatagttccggagtctttcttatcatcagaaaccagagatttcagtttatcgaacaaacccatgatcttctcctaagcagtaatttgggccgcatctcgtggattagcagattgttttttcttcaatgaacttgttaaccagcgtcattaactcgtccgttgtcggttgagcaagagcctgctctgctaacaccttcgcatcttcgaagttcgtgttacggataatcttcttaatgcgcgggatggaaatggcgctcatagagaattcgtccagacccatacccagcaacagaagtgtagcacgttcgtcgcctgcaagctcaccacacatgccagtccatttaccttctgcatgagaagcatcaataacttgcttgatcaagttcagtacggacggtgacattggctggtagagatgtgaaatcatatcattaccacggtcaactgccagggtgtactgcgttaaatcattggtgccgatactaaagaaatcaacttctttggctaaatgacgcgcaatggtcgccgccgcaggtgtttccaccatcacgccgatctcgattgactcgtcaaatgctttaccttcgtcgcgcagttcctgcttgtagatttcgatctctttcttcagtgcacgcacttcttcaacagagatgatcattgggaacatgatgcgcagcttaccgaacgcagaggcacgcaggattgcgcgaacctggtcacgcaggatctctttacgatccatcgcaatacgcacggcacgccagcccaggaacgggttctcttctttcgggaagttcatgtacggcagctctttgtcgccaccgatgtccatggtacggacgataaccgcctgagagccacaggcttcagcaacggctttatacgcagcaaactgctcttcttccgttggcagcgcgtcgcggtccatgaacaggaattctgtacgatagagaccaacgccttccgcaccgttgcgctcagcgccatcaacgtcgcggacggtaccgatgtttgcgcacacttctacctgatggccgtccagagtgatggctggcaggtctttcagcttagcgagttccgctttttcagtcgcaacctgctcctgaaccgcgcgcagtttttcgatctcttcgttagttgggttgacgtaaaccagattgtttacggcatccagaatcagataatcgccgtttttcacctgagaggtgacgctaccggtacccacgatggcaggcagttccagagaacgcgccatgatagaggtgtgggaggtacggccgcccgcatcggtgatgaaaccgaggacctttttcaggttcagctgtgcggtttcagatggggtgaggtcagcggcaaccaggatcacttcatcctgaatcgcgctcaggtcgataatggccagacccaggatgttgcgcagcaggcgcttaccgatgtcacgtacgtcagccgcacgctctttcaggtattcatcatccagttcttccagggcagttgcctgaccttcgataacttcatgcgcagccgcgtcggccgtcatgcctttatctttaatcagggctatgatttcctgctccagctcctcatcttcgagcagcatgatgtgcccttcgaagatggcttctttttcttcaccgaaagtttcgccagctttagttttgattgcttccagttgcgcagatgccttggcacgaccgctcagaaaacgttcaacttcctgatcaaccttgtcggcagaaatttttttccggtcgatgacgatctcgtcttctttcagcagcagtgctttgccgaaagcgatacccggggatgctaaaatgcctgaaatcataaccctaccttacttgtgactgatatttaaaagaacccggaaacttactcgagctcagccatcagttttaccagatgctcaactgctttctgctcgtcttcaccttccgcagagatggtgactacggtgccctgagtcaggcccagagtctgcagtttgaacaggctttttgcgctggcgcttttgccgttggaagtcacagtgatttcagaagtgaagcctttcgcttctttaacaaactgagcagcagggcgggtgtgcagaccgttcggagcggtaatggtaacttcttgctggaacattgtatttccccaacttataggtttagtgttgtggaactaaagtctagcctggcgactgaactttagcctgtattgttagcgctgacgtttcgatcgtcattaaacattatgcagcgaaagcaagacttgaaccaaatcataaaatcgattcagcaaggctatttcgttcgctgattaatttcacgcatcaaaataattgctggtttaaataccagacccaacggggtgaagcaatgccaggaggggcaaaagtttgaagcaggccacaaaaaagcacctgaaaaggtgcttttttacgcgttattaacatagtggcactactgttgcagctctttttcagtgaacagatcggcaaacagtgcggtgctcaagtaacgctcacccgaggaaggaaggataaccacaatattcttattggtaaaggcctcatcttcctgaagtttaagcgctgccgcaacggccgcaccggaagagatacctgccagaataccttcttcatccatcaggcgacgcgcggtagagatggcttcttcgttcgtgatagtgactactttatcaatcagcttcagatccaggttgcccggaatgaagcctgcgccaatcccctgaattttgtgcgggccgggtttgagctcttcccccgccagggcctgggtgataaccggtgaatcagtcggctcaacggcaacggtgatcagctcttttttacctttggtgcctttaatatagcgtgacacgccggtcagcgtgccgccggtacctacgccggagataaagacgtcaacctggccgtcggtatcttcccagatttccgggccggtagtcttctcgtgaatttccgggttagccgggttgctgaactgctgcagcagcaggtatttcgccggatcgctggccacaatctcttcggctttctgaatggcacccttcatgcccttcgcgccttcggtcagcaccaggttcgcgcccagcgctttaagcagcttacgacgctcgatgctcatggtttcaggcatggtcagcgtcagcttgtagccgcgcgcggcagcaacataggccagagcgatcccggtattgccgctggtcggttccaccagctcaacgcccggcttcagtacgccacgtttttcagcatcccaaatcatgtttgcaccgatacggcattttacgctgaagctcgggttacgtgattcgaccttcgccaggatgcgtccattaccgatacggttcagtcgaaccaggggcgtatgaccgatagtcagcgagttgtcttcataaatcttactcatggcctgtccttaactgtatgaaattgggataccgacccagcatacctgctaagcaggtagggggaagtaaggaattcgcatatctatatactgcaaggaaataatggggatcagtatggaataaggggcggcataagccacccctgctttacacatttttgcattatttccataacgcgtgcttagcacggtagcagtcgacccacatggcggtcgcgccgcaaacggcaaccggcatgatgaagagattcaggaacggaatcatagtgaacaggctggtcagcgcgccaaactgcatattggcgatcttctggctgcgcagggcggtgcgcatctctttaaacggcaccttgtggttatcgaacggatagtcgcagtattggatggccagcatccaggcgctgaacaggaaccacagcaccggtgccaccgtctggccaatgccgggcacaaaatagaggataagcagcacaaccgcgcggggcaggtaccaggcaaacttctgccattcacgcttcataatgcgagggaggtctttcatgatccccaggatgcccgtgtccggcggtgttgcgccggtaaggcgcgcttccagctgttccgccagcaaaccgttaaacggcgcggctatccagttggcaatcgtcgagaagaagtagccaaataccagcaaaacggagatcaccgccaccggccagagcaggtagttaagccactgcagccagtccggcacgtagctcatcagcgatgggatccagctttccagttttgtgaacagccaccagaacgcgccgcccatcagaataatgttgatcaacagcggcagaatgacgaagcgtcgaatacccggcagagagaccagtttccagccctgagaaaaataccagacgccgctgcgcgggggagaagaagatgttgaaaccatagccaggctgtactcctttttacacaaccagtggaattgcccgcctatattatccacttacggaccaatgaccagttcggaaatgttcgaaaaaccagcaaaaagcacgatttccttcatctttatgctgtgaatgctctgcacacacttgcacttgacgtaaacggcaaatactcttagtgagtaaatgtttgccgtggtggcaaggtgttagaacaacagagaatataatgatgcaggatttgcgtctgatattaatcattgttggcgcgatcgccataatcgctttactggtacatggtttctggaccagccgtaaagagcgttcctcgatgtttcgcgatcgcccactgaagcgcatgaagtccagtcgtgacgacgatgacagtgaagatgacatcgatggaagcgacgatgacggcgtgggtgaagttcgtgttcatcgggtcaatactgcgcccggcgtaggccatggggagcatgaagcacctcgtccttcgcagcaccagtatcaaccgccgtatgcttctgcacagccgcgccagccagcgccgcagcctgtggaagaaccggtgcgccagccgccgcaacagcctgtgtatcagcagcctgctgcgccacagccggttcaacagcaacccgtgcagcagcctgtgcaacagcagcctgcgcaaccggtacatcaaccgcagcagcctgttcatgttcaacctgcgccgcagcccgctccggccccgcacgttgagcctgagcccgttgtagagccagagccggttgttgaaaaaccgcagcgtaaagaagcggtgatcatcatgaacgtggccgcccatcacggcagccatctgaacggtgacgtactgctgaacagtattcaacaggccggcttcaagtttggtgatatgaatatcttccatcgtcacctgagcccggacggtagcggcccggcgctatttagcctggccaatatggttaaccctggcacattcgaccctgaaatgacgggcgatttcgtgacgccgggtgtcactatctttatgcaggtgccgtcctacggcgacgaactgcaaaactttaagctgatgctgcaatccgctcagcacatcgctgacgaagtgggtggtgtggtgctcgacgatcagcgtcgcatgatgacgccgcagaagctgcgcgagtatcaggaccgcatccgcgaagttaaggaagccaacgcgtaaccgacgcgttatcttcaactcctcctcaacccccgcatgtcgggggttttttctcattgatggtgtgatatggactcaatcgaacaacaactcactgaactgcgaaccacgcttcgccatcatgaatatctctatcatgttatggacgcgccggaagtcccggatgcggagtatgaccgcctgatgcgcgagctgcgcgaattagaagcgcagcacccggagcttatcacaccggattctcccacccagcgcgtcggcgctgagccgctgggcgctttcagccaggtgcgtcatgaagtaccgatgctgtcgctggataacgtcttcgatgaagagagctttctcgcgtttaacaagcgcgtgcaggatcgcctgaaaagcagcgacgctctcacctggtgctgcgaactgaagctggatggcctggcggtcagtcttctctatgaaaacggcgtgctggtgcgtgccgcaacgcgtggcgacggtacgacgggcgaagacatcactaccaacgtgcgtaccatccgcgcgatcccgctgaagctgcagggtgacaacattcctgcacgtctggaagtgcgcggcgaggtgtttctgccccaggcgggcttcgagaaaattaacgaagaggcacgtcgcaccggcggtaaggtgtttgctaacccgcgtaacgcggcggcgggctcgctgcgccagcttgatccgcgcatcaccgcgaagcgaccgcttacgttcttctgctacggcgtcggtattctggagggcggcgagctgccggatacccatctcgggcgtctgctgcagtttaaggcgtggggcctgccggtgagcaaccgcgttcagctctgcgactcgccggaagcggtgctggcgttctaccacaaggtggaagcggaccgtccgacgctcggctttgatattgatggcgtggtcatcaaggtgaactcgctggcgctgcaggagcagctgggctttgtggcgcgcgcgccgcgctgggcggtggcgtttaagttcccggctcaggagcagatgaccttcgtccgcgacgtggagttccaggtgggacgtacgggggcgattacgccggtcgctcgtctggagcccgtacaggtggccggcgtgctggtgagtaacgccacgctgcataacgccgatgaaatcgaccgcctgggtctgcgtattggtgacaaagtggtaattcgccgcgcgggggacgtgatcccgcaggtggttaacgtcgttgagtcagagcgtcctgacgatacgcgcgaagttgtcttcccgacccattgcccggtgtgcggctcggacgttgagcgcgtagaaggtgaagcggtggcgcgctgtacgggcggcttaatctgtggcgcgcagcgtaaagagtcgctaaagcacttcgtctcccgtcgcgcaatggacgttgacggcatgggcgacaagattatcgatcagctggttgagaaagagtacgtccacacgccagcggatctcttcaggctgaccgcaggtaaactaaccggtctggatcgcatggggccaaagtcagcccagaacgttgttaacgcgctggaagcggcaaaagagaccaccttcgcccgtttcctttatgcgctgggcattcgtgaagtgggtgaagcgacggcagcagggctggcggcgtactttggtacgctggaggcgctggaaaaggcaagcatcgaggagctacagaaagtcccggatgtcggcatcgtcgtcgccacgcacgtctttaacttctttgctgaagagagcaaccgcgaggtcatcggccagctgctggcagagggcatcaaatggcctgcgccggtcgtcgtcaacgccgaagagatcgacagcccgttcgccggtaaaacggtggtgctgaccggcagcctgagccagctatcccgtgatgatgcaaaggcacgtctggtcgcgctgggagctaaagtggcgggcagcgtgtcgaagaaaaccgacctggtgatcgccggggaagccgccggttccaagctggcgaaagcccaggagctggggattgaggttatcgacgaagcggaaatgatgcgtctgttaggagagtaacgtggagaaagagcagctcgttgagatcgccaatacggagatgccgttcggtaaatacaagggccgcaggctgattgatttgccggaggagtatctgctgtggtttgcccgtaaggataaattcccggcagggcgactgggcgagctgatggctatcacgttactgatcaaaaccgaggggctgacccagctggtgcagcccctgaaacgtccttaagccttcgcggcgcgggtcccttcctgcgtcagtttttccgtctggcgcttgtagcgacgcgccagcaccgcgcagaccatcagctggatctgatggaaaatcattagcggcaacaccatcattccaatcaccgaggtcgggaacagaatgttggccatcgggataccgtttgccagactcttcttcgaaccgcagaacacaatcgtaatttcatccgctttgttgaagccgcacttgcgtgccacaaagacgtttactgcaatgacaattgccagcaggatgaggctgaccaccacgataaagagcagcgaaccagcgcccaccttatgccagatcccgttcacgaccgcttcgctgaaggcggaatagaccaccagcaggatcgacgactggtcggtttttgagatccatttcttgtgctttgccacaaatgcgcccgtccacggacgcgagagatgccccagcacaaacggcagcagcaactgcaaacaaattttgccgacttgctcaaggttaccttccgcgccgtgcatgttcattagcaggcccaccagcagcggggagacgaaaatccccagcaggctggatgccgatgccgagcagacggcggccgcaacgttccctcccgccagagaggtaaaggcaatggcggattgcacggtagccggcagaatacagagatacagaaaaccggtataaagcgccgggtcgacgttgaccggtgcccaccaggcaaaaagtacgccgaggatcgggaagagaatgaacgtgctgcacatcacccagagatgcagccgccagtggctcccccctgcgataatcgcttctcgggacagcttcgcgccgtgcataaaaaacagcagtgcaatggcggccgtcgtcagcccttcaaagaacggaacgaacccgccgcgagcgggaaagaacgaggccagtaaaacggtaacgaccagggtgagcgtaaacggatcaacaatacgaaatagtttcataatgactcctgaaaacagatgtcgctattgtgcttttttccatttgagaaataaaattgatttattgcatccattcatgaattaaacagatgaattattccttacgccagctccgcattttcgttaccgtcgccaatgcccgcagctttagccgggcaggggagatgattggcctgagccagtcggcggtcagccacagcgtgaaagaactggaaaatcagaccggcgtccggttgcttgaccgcaccacgcgcgaagtggtgttgaccgaagccgggcagcagcttgctctgcgccttgaacggctgctggatgagctgaacagcacgctcagagacgtggggaggctggggcagcagctttcgggtaccgtgcgggtcgcggccagccagacgatatctgcacaccttatcccgcagtgtattgccgaggggaaccatcgctacccggaaattgactttgtcctgcatgaccggccacagcagtgggtactggagagcatccgccagggggatgtcgattttggtattgttatcgatcccggccaggtgagcgatctggagtgcgaaagcgtactttcggagccctttttgctgctctgccgtgacgacgatccgctggccgcgttgcctgacgtcaggtggcagtcactgcagggcgcacacctggttttacaagattatgcctcgggcagccgcccgctgattgattccgcactgatgaatcagggggtaaaggcagcgatcgtgcaggagattggtcacccggcaacgctgtttcccatggtggaagccgggattggcatcagcgtgttgcccgccctggcgcttcccctgcctcagggaagtcgactggctgtgaagcggttgacgcccgttgttgaacgaaagctaatgctggtgcggcgaaaaaatcgttcgctctcgggggcggcgcaggctatctgggaagtggtgcgtatccaggcacagcgattgaccgaggcccgcatacgcgatccactgtttaacgcttcagaagattagatgtagatatcaatctgattattatctgatgggctattcacaccttccactttgcccaatttttgatcctgctttttctgggcctcttcggcctgctggcgctgcagtgcggcgagctgcgcctgaagcactttgatctgggtctgaatcagttcctgctgctttttcttttcatccgtgctgccgggactgttcgccagctcttttagctgctgagttagctttttgatcttatcgagaatgcggctgatttgcgcggcgatatcgttactgctggaagtaccgctcccgccgctggtttgaataggttgggttgatgcctgaatggtcgtcatactttttcctcgcgttataaaacagaggtatcggcaccgacgggattagcttgagggaaatgcggcagtttcacattttttatatcgcagatagcaaaaaagcgcctttagggcgcttttttacattggtgggtcgtgcaggattcgaacctgcgaccaattgattaaaagtcaactgctctaccaactgagctaacgacccgaaatggtgggcgatgacgggctcgaaccgccgaccccctccgtgtaaaggagatgctctaccaactgagctaatcgcccatttcggaactgctgcgataagatgagaatggtgggcgatgacgggctcgaaccgccgaccccctccgtgtaaaggagatgctctaccaactgagctaatcgcccaatctcaatctttatctacactgcgagcctaccgaagtagatggtgggtgatgacgggctcgaaccgccgaccccctccgtgtaaaggagatgctctaccaactgagctaatcacccccgctgtgtggagtcgcattatagggagagttgaaaatgagtcaacgcattttctaaagtttttattcgttcgtcgtaaaattaagcaaaacgatcgcgaaacgggcagtggcgcatgatttctaaacaaaaatcgcaaactcgggcccgattcagggaacaacattgaggaatcgccgcacagtgatagaatattgcccattgttttttccccaggatttgccgattgccggcatctttataacgtaaggccatttcatgaaaatcaaaactcgcttcgcgccgagcccgacaggctatctgcacgtcggtggtgcacgtaccgctctctattcctggcttttcgcacgccacaacaaaggtgagttcgtgctgcgtattgaagacaccgatcttgagcgctccacgccagaagcaattgaagccattatggatgggatgaactggctgaacctggaatgggatgaaggtccctacttccagaccaaacgctttgaccgctataacgccgtcattgatgagatgctggtcgcgggcacggcgtataagtgctactgctccaaagagcgtctggatgcgctgcgtgaagagcagatggcgaacggtgaaaagccgcgttatgacggccgctgccgccacgaccacagcgagcatgctgcagatgaaccttgcgttgtgcgttttgctaacccgcaagaggggtctgtgatctttgacgatcagatccgtggcccgatcgaattcagcaaccaggagctcgacgatctgatcatccgtcgtaccgatggttctccaacctacaacttctgcgtcgtggttgacgactgggatatggaaattacccacgttgtgcgcggtgaagaccatatcaacaacacgccacgtcagatcaacatcctgaaggcgctgaacgcccctgtgcctgtttatgcgcacgtctccatgatcaacggcgacgacgggaaaaagctgtctaaacgtcacggggcggtgagcgtgatgcagtatcgcgacgacggctatctgccagaagcgctgctgaactatctggtgcgtctgggctgggctcacggtgaccaggagatcttcagccgcgaagagatgatcgaactgttctctctgagctctgtcagcaaatccgccagcgcgttcaacaccgacaagctcctgtggctgaaccatcactacatcaataccatgccgccagaatatgtggcgacgtatctgcagtggcacattgaacaggcaaatattgatacccgcacaggccctgagctggcggatctggtgaaactgctcggcgagcgctgcaaaacgctgaaagagattgctgaaagctgccgctacttctatgaagagtttgatgcgtttgatgcggacgccgcgaagaaacaccttcgcccggttgcgcgtcagccgctggaagtggtgcgtgacaagctggctgccattaccgagtggaccgcagagaatgtgcatcacgccattcaggcgacggcggacgagctggaagtcggcatgggtaaagtcggtatgccactgcgcgttgcggtgaccggtgcgggtcagtctccggcgctggacgtaacggttcatgctatcggcaaatcacgcagcgtagcgcgcattaacaaggctctggactttatcgctgaacgagaaaatcagcagtaataacgtctcagataaaacaaacggcaggggaacctgccgtttttttatgcttcttcttctgcaatacccagacgcttaagaaagccgtgaatgccttcgcgcttcaggaaggtgtccagacgcttctgctctgctgcagtcatattctccagcgtctcaattatgcccggaaacaggtttgcagagggggcattgtaggcggaggtggcctccgcgagatggtataccgcctgacggttgcgaatcgccgggagactcatgatatgttccttcacgcgcgcatcgatatgaatgagcctcgcgcggccgcctttcacgccgttgagtccttctgttttccagccctgctggcgaacccagcgattaaccgtttgcctggcaacgcccaaactctccgccagctcttccgtggtcattttgctccgtaattttttcatatcagtcccgatcgcgaatccctaaacgttgcaacaatccggtgatcccttcccgcagtaacagcgatgtcatctgtttctgctcttccggcgtcatttcatcagccagcgtcaggagtagggtgtgaagcgaactgttatggctggtaccttctgccatatcggacgtttcgcttgcccgacgtgcgctgcggataaagtcgcggactttttcgttcacatgtaccagtcgcgctttcccgccctgaacgccaggttttggtgacgtaatccaaccctctttgcgtacccatttattgatggtctgtcggctatagccagtgagcagggctaactcttctggcgtcattcgttccttgatcatgcaatttcctgaatatcagtggggttaattaacggctcattttatagcaccgttttacatgaaaacgtgacaggcttaactcctgattacgagcacgctcgcaaagtgattcatttgcatgatttttcggcgatcgaacggcggtcattgattttgccgttgacactccgcagcggaattcatattatgccgcccgtcaacatgacagctttacgatggggctatagctcagctgggagagcgcttgcatggcatgcaagaggtcagcggttcgatcccgcttagctccaccaaactctgaacccaacagagtgcggtcagtaaagtcacatgtggggctatagctcagctgggagagcgcttgcatggcatgcaagaggtcagcggttcgatcccgcttagctccaccaaaattgtaaaccctcgtcaaatgacgaggtttttttttatctgtttgtaacgcccgccactggtttttgttatcaaaaagaaggtattcccatacctcacctcaatcgaaatcaataaacgtgtctataaatagacttgaacttgattcgtgcaattaataaacctattatccatccggtcaatgattcagacggataatatactcatcagcttaatgaatagaaaaacgtacaataatgtaaagatatttataattgccctgacactttgtctgattgcggtacctgtctcccgttatctctctccacgcgcaattgttaatggtcatgacgtttatttagcatggctgccgctcagcgtgatgctggcggtaattctgctgtttgggcgcagggctattcttcccattttgttaggttttactgtcactaatttattctatattagtttagcaccgctacaatattcagttttgctattctgtcagacctttgcgttgttcgcggcctgcggcctgctacgcctcatgctgggcaagcgctggcgccactccatccctaacaagcacatcgggctacgtatattctggctcggttttattgtgccatttggtattaagctgtcgatgtatatggcaggctatttgtttgattttccggtgactatctcaacctatttcggcgaagggacggtaatttataatgttgtggatattcaaagcctgatatgcgcggggctgatttttaccatgatgttctattacccattaagaatgataattaatcctcgttatgccgtcaccttctggcggcgaagcgtgaagcccgtgttttatcacaagaatccattatatatttttgtctggccgatgcttttaggcgccattctcatcattttatgtggtccttttgaatcaccggtcattgcgggctatttgatgccgctgatttttattctttttaccctggcaataagccgcctgacctatgcgttgatttctctgctgtgggccacctcagcgctcctgctgttgacctacaactacaacttcctgaacggggtcgaatcgggccattcactctcctttatcctctccgtgctgatttctttcgctatctgcttgctttacatgtcgcgcatttaccagcgcagcgagtggctgaagcggggctggcagggcagggcgcttaccgatccccttaccggtttgcccaatattcgtgcgctggaagattatcttgagattcacccggatgccaaagtgtgcattctgcgcatggataacctggagtttttgagccgccactacgggattatcatgcgggtccactgcaaacgtacgatcgccacgtcgctacagcctcttttgcagaaagatgagacgctcttccagcttccgggaagcgaactggtgctggtattactggggccgggaaccgccgagcgtctccagcatatggtcgatcggctgaacagccgtaagattttctggaacaacaccgggctggatattgaatttggcgcatcctggggaatggtcgaaaacggcgaaaagcttcatcacacgcagggacagctgagctggctggcagagcaggcctgcggagagcaaaacgttctcgcgctcacgaatagccttgaggcggcatcaggacaaacgacagagcgtgtcctgatgctggcgcggattaagcatgcccttgaggcggggcagttccatttatacgcgcaaccgatccagaaggcggacgggagcgggtattacgaaatcctggcgcgtatggagagcgagggcgagatcttcacccctgaccgctttattccgctgattgcccagttcaacctcagccatcggtttgatatgtgcattatggagaaattactgctgtggctgcgcgatcacccttcaactcaggctggcacccgtttctccgtcaatctgatgccgctcacgctgatgcaaaaagaggtggcgactgagatttgcgcgctgtttgaacggtacggcgtggcacctcaggccgtcgtgattgagatcaccgaggagcaggctttttcaaattcaggcacaagtatcaacaatattcagcagctgcgggattacggtttccgaattgccatagatgattttggtactggctacgccaactacgagcgcctcagacgcctgcaggcggacatcattaaaattgacggctgctttgtgaaagacatttgtacagacgacatggatgcaatgatcgtccagtcgatgtgtaatctggcgaaggcgaaatcgctgtgcgtcgtcgcggaatacgtcgaaacgccggcccagcgggagatgctgcttcgctttggtgtggattacctgcagggatacctgataggcaaacccaaaccgctggaagaattgcgggcataaaaaaaccgggagccaggctcccggtttttgtttaacggtaaacgttacagaaccagtgccgcgatagatgcggacaggacgctcaccagcgtagagccgtaaaccagcttcaggccaaagcgagaaaccacgttaccctgctcttcgttcagacccttaatcgcaccagcgatgataccgatagacgagaagttcgcgaaggagaccaggaacacggacagaataccttccgcgcgtggagaaagcgtgctggcaattttctgcagatccatcatcgcaacgaattcgttagaaaccagtttggttgccatgatactgcccacctgcagcgcttcgtgagccggaacacccatcacccatgcaactgggtagaagatgtagcccagaatgccctggaaggagatacccagcaccgcggcgaacagggcgttcagtgcagaaatcagcgcaatgaagccgatcagcatggcggcaacgataatcgcgactttgaaaccggccaggatgtattcacccagcatttcgaagaagctctggccttcgtgtaggttagacatctggatgttctcttcgctggcgtcaacgcggtacgggttgatcagcgacagaacgataaaggtgctgaacatgttcagtaccagcgcagccaccacgtattttggttccagcatggtcatatacgcgcccacgatagacatggaaacggtagacattgcggttgccgccatggtgtacatacggttgcgggacatcttgccgagaatatctttatacgcgatgaagttctcagactgaccgaggatcagggaactgacggcgttgaaggattccagcttacccatgccgttcactttggataacaggaaaccaattccacgaatcacgaacggcagaacgcggatgtgctgcagaataccgatcagcgcggagatgaagacgatagggcagagaaccttcaggaagaagaacgccagaccttcgtcgttcattttaccgaagacaaagttggtcccttcattggcgaacccgagcagtttttcgaacatttcggagaagcctttcacgaagccgaggcctacgttggagttcaggaagaaccacgcaagtaaaacttcaatgaccagcagttggacaacataacgaatacgaatttttttgcggtctgtgctgaccagcaatgcgagtgcagtaacgacaacaagtgccaggacaaaatgaaggacgcggtccatatttgctccaaatatgaggcaggtttaattttcgtgcacattctatgtaacaagcgaaaagaaaacgagatcgaggacacactatagttacatcctgtgacgagtctcaaaaatagtgatccacaatacatttttgttatgttaggtaaatgagtgaaaagttaagtttgtgtgctagtcttcacaaaagcatgcgcgatttcagtttcagttagatcgccccacttacccgcccgtctatcgttcaaagctatcagagaaatcactgcaaacttcataaatgatcttgataatcattctcattttgatagcattaaacatagcaaaggctatatttcagaggcagaaatgacaaacagtcgcgtagagggtagcagtggcagagcagcgcgcaagttgcggttcgcattaatgggacctgcgttcatcgctgccattggttatatcgatccaggtaactttgcgaccaatattcaggccggggccagcttcggttataagctgctctgggtggtcgtctgggcaaacctgatggcaatgctgattcagatgctctccgcaaagctggggattgcgacgggcaaaaacctggcggagcaaattcgcgaccattatccgcgtcccgcggtctggctctactgggttcaggctgaaatcatcgccatggccactgaccttgctgaatttatcggcgcagcgatcggctttaagctgattctgggtgtgtcgctgttgcagggggcggtcctcaccgggattgccacgttcctgatcctgatgctgcagcgtcggggtcaaaagccgctggagaaggtcattggcggtctgctgctgtttgtcgcggcggcctatatcgttgagctaatcttctcacagccgaatctggcgcagctcggtaaaggaatggcgatcccaagcctgccgacctcggaagcggtgttcctggccgccggggtgctgggggcgaccatcatgccgcatgtgatctatctccactcctcgctgactcagcatctccacggtgggacgcgtaaagaacgttactccgccaccaagtgggacgtggcgatcgccatgaccatcgcggggtttgtcaatctggcgatgatggctactgcagccgcagctttccactttaacggtcataccggtattgccgatctcgaccaggcgtatctcacgctggagccgttgctgagccatgctgccgccacgatatttggccttagcctggtggctgctggtctctcttctacggtggtgggtacgctggcaggccaggtggtgatgcaggggtttgtccggttccatattccgctgtgggttcgtcgttccgtcaccatgctgccgtcatttgtggtgattctgatgggactcgacccaacgcgaattctggtcatgagccaggtgctgctgagttttggtattgcgctggcgctggtgccgctgctgatctttaccagcaacaaaactctgatgggcgagctggtcaactcaacgctggtgaaacgaaccgggtgggccatcgtggtggtggtcgttgcgctgaacctgtggttgttagtgggaaccgcgctgggtctttaacaaaaaaaggagccgtggaggctcctttttgattagtgatgatggccgtgaccatgacctttgccgcgaccccagccgccgcgacggtcgtcacgatcgttccagccttcacggtaaccgcgctcataggcgctgtctttataccagccgcggtgtctgccgttatcatgtttccaccagcgatcgccgcgccactcatagtgacgatgccagtaatcacggtcgcgccagtagccgccgtcccagtatctgccgtagtcgtcacgatcgccaatttgcaattttactgatggcaacagggtgatttcgcccgcagtggcgatcagcggcgccgaagccagtaataccgctgcaagaatcagtgacctgaacatactctttctccttcacgatcggggcctttgttgggcctgttaacgcaattttacgagttggtaaagcgccgtatcatcgcctcaactccgaattcctgggtgagagcactttttgctaaaagtgatgttatattgagctgctcaggatcgcgtctatacgggccaactcttctgcagagaaatggcggtttgccagcatccccacggcgtcatcaatctgagccgctttacttgccccaatcagcaccgacgtcacgtcctcatggcgtaatacccaggccagcgccatctgggacagcttctggccgcggctttctgccagggcattcagcttcctgactttctccagcttctcttcagtgagctgatcgggtttgaggaactgactgccgcttgccgcgcgtgagtctgcggggatgccgttcagatagcgattggtcagttgcccgccggccagcggcgagaagggaatacagccgactcctttttcctgcaacacgtccagcagccccgcttccggcgcacgttcaaagagggagtatttcggttggtggatcaggcagggcgtcccgaggtcattaaggatatcaatcgcctggcgagccagaacagccgggtagttggataatccgacatacaaagccttcccctgacgcaccgcatggtcaagcgctttcatggtttcctgcagcggcgtttgaggatctggccggtgatgatagaagatatccacatactccagccccgtgcgcttcaggctttgatcgaggcttgccagcagatatttacgtgacccccagtcgccgtaaggcccctcccacatggtataacccgctttggtggagatgattagctcgtcgcgccagggcaggaaatcctcctgcaaaatacgtccgaaattactttcggccgatccggggggtgggccatagttgttggcaaggtcgaaatgcgtaatgcccagatcgaacgcacgctgtaaaagttgacggctgttttcgataagggtggtgtcaccaaagttatgccacagcccaagcgagatggcaggcaacctgagtccgcttcgcccgcagcggcgatactccattgtcctgtaacgatttttgtccggctgataacccattttcgtgacctctggcgctgaagtgaaaaatcagtgtatgcgtttacattttcgtgaaaaaaagcagcatagcgcagccttttttgtaaagcattctttccatgcccttcttatcaccaattctggacagccatcacgcttatttaatactcaaggtgaggtcaacattagaaggatacctgttcatgcgtaccccatactgcgtcgccgattacctgctggaccgtcttactgattgtggagccgatcatctgtttggcgtgccgggcgactataacctgcagtttctcgaccatgtgatagacagcccggatatctgctgggtgggctgtgccaacgagttaaacgcttcttatgccgctgacggatacgcccgatgtaagggctttgccgcgctgctgacgacatttggcgtaggagagttaagcgccatgaacggcattgcgggcagcttcgccgagcacgttccggtcttgcatattgtgggggcaccgggtacggcatcacagcaaagaggggagctgctgcaccacacgcttggcgacggtgagtttcgtcatttttatcatatgagcgagccgatcactgctgcacaggcgatcctgaccgaacaaaacgcctgttatgaaatcgaccgggtgttaacgacaatgctccgggagcgtcgccccggctatctgatgttgcctgccgatgtggcaaaaaaggccgccactccccctgtaaacgctctcacgctcaggcatccacatgccgatagtgcttgcctgaaagcgttccgggacgccgcagaaaacaagcttgccaggagcaagcgtactgcgctgctggccgatttccttgtcctgcgccacggcctgaagcatgcgctacaaaaatgggtcaaagacgtgccgatggcacacgccaccatgctgatgggcaaagggatatttgacgaacgtcacgctggtttttacggcacctacagcggttcagcgagcgccggtgcggtaaaagaagcgattgaaggggcggataccgtactgtgcatcggcacgcgatttaccgataccctgaccgccggcttcacgcatcagctctccccggcacaaacgatagaagttcagcctcatgcctcacgcgtgggtgatctctggtttaccggcatccctatgcttcaggcaatcgaaacgctggtggaactgtgcaaacagcacgtgcacgagacacccgcgcagtcttctcaaagcgcgatggcctacccgcagccggatggctcgctgacgcaggcgaatttctggcaaacgttgcagacatttattcgtccgggagacatcattcttgcggatcagggcacctcggccttcggcgcgatcgaccttcgtctgccggctgacgtgaattttatcgtccagccgctgtggggatcgattggctatacgctggcggcagcatttggcgcgcaaacggcctgcccgaaccggcgcgtgattgtcctgacgggggatggcgcggcgcaacttactattcaggagcttggctcgatgctgcgggataaacaacaccccattattctggtcctgaacaacgaagggtacacggtggaaagagcgatccacgggcctgagcagcgttacaacgacattgcactatggaactggacgcaaatcccgcaggccctgagccttgatcctcaggcccagtgctggcgggtcagtgaagcggagcagctggcggacgtccttgagaaagtggcacaccacgagcggctctcgctgattgaggtgatgctgccgaaagccgatatccctccgctgctgggggcgatcaccaaagcgctggaagcgcgcaacagcgcctgatcatttgtcgtttcgccaggccatcatcatcggtttgcccgccagcaggagccaggcgggcaacatcacgatgcaaagtaacgggatgagggtggtatccggtaccaccacggcggccatgaagaggctcagccaggcatcgcgcgtgaccaccagcaccagccccagaatcgagcaggaaacggtaatcgcagccggaacggcatcgacatgctcgtgcagcatcagccccagcgcaacgccgacaaagaccgccgggaagatgcgtccaccgcggaaaccgcaggcggccgccaccaccagcgctgccagcttgatcacggcaaacagcagatagtcggagacgctaaacacctggctgaaggccagctgctgcatctcgtccagtcctttaaacagcgtcaccggcccgccgatcgtacctaaaatacccagaatcaaaccgccagcccccagaatcagcaccgggtgtttgagtctgtgcatcagccggtgcaggcgtggaagacaccatactgccaccatgcccagcgcaatggcgatggcggcgacgatggcaccgctgaaaatatcggcgatttgcatctggccgtagtgggggagagagagtgaaaaatggggatggaaaaacaggctggtcgtcaacgctccggcggctgcggccatcagtggggcaaagagcttgtcccacagcgggacgtcgttattgctgctgagcgtctgcgaaaagatcagtgcggcagcgacgggcgtgccgaaaagtgctccgatggtgcctgcggaggcgagaatggtccagtccagcgcgccaacgcggggcaaaatgcgtgaaccaagaaaaaccgccaggccaatgttcacggccataatcggatgctcaggtcccagactaacgccgccggccagaccgataatcagcgcaataattagccctggcaacgccgagggggctaccggggcaccaatcaacggttccagtgccggatcggggccggcatggccgggactaaaacggatcaccaggcccaccgcaataccggttaacgtcagcatcccaacgatccacgcaggagagtcagcggtgacgcccagccctgcaggaagcgcgttccataatagtgtttgcagcaccgacgcgactttcatcacgacaataaggaccagacttgaaaccacgccaatgatgagcgccggaattgccagcaacagcatggttctggctcgcgggtgaagcatgatgatttccttgtacaaaacggtatgacgttactttgcacattaagccttatggcaatagtgcaaaaggtgctgaaacggtaaagttattctgtgacgaagatcgataatccatgggcattcaccttccggtcgttgttgttatcacgccttgaatttacagtgtcccaaagatttattctgactttagcggagcagtagaagaatgacaaagtatgctttggtaggcgatgtgggcggcacgaatgcgcgccttgcattatgcgatgtaaatagcggtgaaatttcccgggcgaaaacctattccggtctcgattatccaagccttgaggccgttgtccgcgtctatctggaggagcatcagataagcgtcgaagatggctgcatcgccattgcctgtccgataaccggcgactgggtcgccatgaccaaccatacctgggcattctccatcgccgagatgaaaaaaaacctcggctttgcgcatcttgaaatcattaatgactttaccgcggtgtccatggcgatcccgatgctgaagcctgagcatctgatccagtttggcggcgctgaaccggtcgaaggtaagccgattgcggtttacggggccggtaccgggctgggcgtttcacatctggtgcatgttgcccagcgctgggtgagcctgccgggtgaaggtggtcacgtggactttgcgccaaacagcgaagaagagggcattatcctcgaagaattacgcgcggagatcggccacgtctccgccgagcgcgtgctgtcaggaccggggctggtgaacctgtaccgggcgattgtgaaatcggacggtcgtctgccggaaaatctgcagccgaaagacgtcaccgaacgcgcgctggcggacagctgcattgactgccgtcgtgccctgtcgctgttctgcgtgatcatggggcgcttcggcggcaatctggcgctgacgctgggtaccttcggaggcgtttatattgcaggtggtattgtgccgcgtttcctggagttctttaaagcctccggcttccgcggcgggtttgaggataaagggcgcttcagaagctacgtgcaggacattccggtttatctgatcgtgcatgataacccaggcctgctggggtcgggtgcccacctgcgtcaggttctcggtcaaatcctctgacgcatagccctctcccgcaggagagggctttttcgttacaggtgcatgagctggcggaactctttcaccttgctgcggctcaccggcacctgaaaatcgagatccttcagacgcaaaatataggtgttgttaaaccacggttcgatctcgcggatcttgtttaaattcacgcagaacgagcggtggcagcggaaaaagtgcgaggcaggcagcttgctgcaaaactcggtgatgttcatcgccatcacgtaagattcccgccgcgtataaacaaacgtcattttttcatgggcttcggcatagtagatatcattgaccggcgtcacgatgatgcgctcatctttgaccaaattaatggtgtcgttttcccgtaccgttgggctggcgtttgcaggggcggtctgctgctgccatgcggcctccagcttttgcagcatgctgacaatccgcgactcctggtaaggcttaaggatatagtcaaacgcctccagctcgaaggcttctacggcgtgctctttccatgcggtcacgaacacaataaacggcttatgggcaaactgattgatgttttgcgccagcaatacgccatccagcgacggaatgttgatatccaggaagatggcgtcgacccggttatgctgcagaaacttcagcacgtccagaccgtcatcaaaggtacccacaatttccatctggctgtgggtgttgataagccaggttagctcctgttgagccagaatttcatcttctacgatgatgactttcatgggttactccacctggggcaacagtgatgttgccgaatgagcgggagagcgctcgttcgggacgtaaaacgcaatttcggtgcccggttcaagacgctgaatatgcagcccgtcgccgtaaagcagcttgacccggtggtgcacgttcagcaggccgattttatttccaggcatctcgttagactccacccgctcaatgacttttggatcaatgccgtggccggtatcgcgcacggcaatacgcacgcggttgccgctttcggtgacgctgatggtgacgacgcctttgcctttacacggctgaatgccgtgaacaatcgcgttttcgaccagcggctggataagcaggcttgggatcacgcagttgacctcttcatcaatatcgtaaatgaccgtgagcttgtcaccaaagcgcgcctgctcaatcgcgatgtagtctttaatctgatacagctcttttttgatgtcgatctgctcgtcatctttcagctcgatgttgtagcgcagatagcgcgacaggttaaaaatcagctggcgcgcggtgtccggattaagacgaatggacgaggagatcgcgttcagcgcgttaaacaggaaatggggattgattttgctctgcagcgcgcgcagctctgccttatttgccatctcacgcagctgttccgcccgcgaaacctcaagctgggtggagataatctgcgacaggccgatggccatctcctgcagcgtggaggtgatctgatgcgcgtggcagtaataaattttcagcgtgcccgtcacgacgcctttctcccacagcggaatcaccagcatggagtggatttccggcgttcggtgggcttcatcattgtttttaataatgattttaccgtagttaatcgcctgtcgggtggttgggctgatggtgtcatcattatcgcgatagttgtgctccccgacgccaacgtaggccagcacgtggtcaatattggtgatggcgacagcgtcagcgtggatgtcatggcgaatgatttcgcagacctgacgcaacgactccgcgttaacgtggcggaagagcggtagcgttttgttggcgatatccagcgccagcttggcctgacgggcggcgctggcctctttttccccttctacgctttgcaccagcagcacgataaagccgatgcacacgctgcccaggatcatcggaataccgattttcgagacgatatccagcccaagttcggtggtcggggcccagacgacgaccaggatcatggtcagcgtttcgcacaccatgcccgccacgatcccggcgcgccagcgctgttttttcgggattttgcggctgatccagccggatagcaccccggcaataatgctggtgataaagcagggcaccgccgtgacgcctccaatgtcaatcaggtagcgatgggttccggcaatcacgccggtgatgacacccacccacgggccaaacaaaattccgccggacatcacggcgataatgcgcacgttaaccagcgaaccctctaccggcacgccagaccaggtgctgaacagggcgaacagcgaaaagatggcggtaacggccagcagctcttttggcgagtgtgcggatttgtgcaatagctcgcgaaacaggcgaatgcgaatgaggaaaaacaggcaaatcagcattaatgccgcacggtcaaaaaccgccagcagcatagtgaatatttcgtgcacgagtagacctgggaaaacgggaaagaaccatgataaaaaacctgacgcgtgttgaccagctatccgtcaggtttatcaaatgaggaaaaaccataatttctaaaggggattgtctgtcggtaacggacacgtcctgattttttatagcctgcgtatcgtcaggtagctgttttgataccatcctgttaaataacggctatcagaaagccaaccctgaaccaggggcttccgcttttcggcacagccgggttccggttttcaggcaatcgcttttttttcacttccctctcgacagcgtgatttttttcaggttattttctaagcacgccacatcggtggcagcgtcgctcggacggtccgggcgctaacgttaatctgaggaatctatggctgaattcagtcctgaacgccgttttacgcgtatcgatcgtctccccccttatgttttcaatatcaccgctgaactgaagatggctgcgcgtcggcgcggcgaagatattattgatttcagcatgggtaaccctgacggcccaacgccaccgcatatcgttgaaaaactctgcacggttgcccagcgtccggatacgcacggctactcgacctcccgcggtattcccagattacgtcgcgcgatctcgcgctggtatcaggatcgctatcaggttgatatcgatccggaaagtgaagcgattgtcaccatcggctcgaaagaggggctggcacacctgatgctggctacgctggatcatggcgatacggtgctggtaccgaatcccagctacccaatccacatctacggtgcggtgattgccggggcgcaggtccgttcggttccgctggtggaaggggtcgatttctttaacgaactggaacgtgcgattcgcgaaagctatccgaaaccgaagatgatgatcctcggtttcccgtcgaacccaacggcccagtgcgtggagctcgatttcttcgagaaagtggtcgcgctggcgaagcgttatgacgtgctggtggttcacgatttagcctatgccgacatcgtgtatgatggctggaaagcgccatctattatgcaggtcccgggcgcgcgtgacgtggcggtagagttcttcaccctgtcgaaaagctacaacatggcgggctggcgtattggctttatggtgggtaacaaaacgctggtgagcgcactggcgcgaattaagagttaccacgattacggcaccttcacgccgctgcaggttgcggctatcgctgctcttgagggcgaccagcagtgcgtccacgagattgccgctcagtataagcgccgtcgcgacgtgctggtaaaaggcttgcatgaagcgggctggatggtggaaatgccgaaggcgtccatgtacgtctgggcgaaaattccggaaccatacgcggcgatgggatcgctggagtttgccaaaaagctgctccaggatgcgaaggtgtgcgtatcaccgggcattggctttggtgattatggcgacacccatgtgcggtttgccctgattgaaaatagcgaccgcattcgtcaggcggtgaggggcatcaagagtatgttccgggccgacgggcttctctcctcgaagagcgtggctgaaaatcccgcgtcatcatgacataaaaaaacaggagccaatggctcctgtttttttgactgcatgttcttcactagatcatcagggcaaaggttccggcccagactaaaacaatcaccgaaatgcccataaagaaatatttcacgtttcatcgctccgcgtatcttgtggtacgcatttaaaaacagagtccacctgattatagagaactgaaatccggtcaaagcggaaatgagaattttcccgtttcgccgctgactccagctcagaattctgtgctttcctgttgccagacggcgctaatgtacgcctaaaaatgaggggtgacaagagggatttttttaaataatttccgtcacttacgagtgtcgtggaacggcgacagtttgatttcgcatcgcaataaattcactttgagcgacgcaatgaaaaacggtttcttaacggatgacaggtgattgaaaaggttagtttcttagcgaaactaacctttctgaagagcttaaatatagagcgaggcttcgccaatagggcgggttttgaaacgacgatgcatccacagatactgctctggcgcacgcatgatttcagtttcgatgactttattgataaacgccgcggcttcgcactcgttttcaggatagttagccatctcaggagagatgtgcagacgatagcctgatttatctgcttttctcaccatcgtcacggtcagcatggaagcgcccgacaaacgagaaatgacaaaggtgccgttggtcgtcgcaacatctttaaccgcaaagaaaggcgcaaagctgctgcctttacgtccataatcctgatcgggggcaaaccagacggcttcacctttcttcagagccccgaccataccgcgcaggttattacggctgatcatcgccttattcgaacgcatgcggccacgcgtttgtacccactccatcagcggactgttgtgcggtcgataggtcgccatcattggctggcacaggcccatcacgcgaccacccaattccagcgacataaagtgaacgccgacgaccatcacgccgcgtttttgcatctgtgcgcgtttaaggttatccagcccttccacgtcaaaccacttgcggacgcgctcatccggccagaaccaggccatgccggtttcaagcagcgccatgccgatagacttgaagttttcagcgatgagtttctcgcgctcttcggcattgtaatgcggaaagcaaagctcaatatttttacgcgcgatggattcgcggcgtttcaggaagaagcgggaagcgctgcccagtttcgaccccagcaaacgcaggacagggtaaggaagttgaaccagcagccagagaacgccaagaccaaaccatgtaaaccagtaacgcgggtgtaaaaacgcgcgttgaaatttggattgagacaaaatagtaaaacctatgtgaagcctgtaaaggtagcgcagagtttgcgatacgacgtgccgataagaccgttcttcaaggtgatggttgcaggctttaccgaactttacggcgttgcctggccacagctgatttgggcgggcggcgtaatgtagcaccgttatacgatatgtgctattactcgtttttgattaaaaaagcggcagttaaggaggtgcttgattttacagattttatagaaagtcgcattgaaagcgtttttcctgactgagcggagagcagaagccctggcgatcggatggaagacgtaacgaaaaagaatggcattgttgagttacggcaaattaattatttctcgtttatttcttccttacctaataaataagaattttctttgtgaaaaatcttatttattattcatatcctcaatggaatagtcgtcttttatcacccacttttctcttcttttaatcgtactgcaataaaatattgcagttctttcttgttttttgacatagtgccgtgatgcaaatcaaaataagatgtttttattaatatctctctggctgcaatcccttcggcgatacaaatattcgatttgtgagaaaagagtagtttctttttctgagttgattgagcaatttgcgataatgtcttagtggaaaattcttaagataattcttgtatcggataaatgatctgtgtatttgattttgttcagatcattatcctattattgcgcatcaagaacgataccgtgaagttggcatagcaaaacaaagagggatgattagatggctgacagttttcagaacgaggtgcctaaggcacgtattaacctgaagcttgacctgcatactggcggagcaagcaagaaaatggaattacccttgaaattgcttgttacgggtgatttcagcaacgggcaggaatctgcgacaatatctgatcgtgaaaagattaacatcaccaaaaataattttgatagcgttctttccgaatattccccaaaagttaacctggccgtaaaaaatacactgtctgacgatggtggtgaagacaacattcagctgactttccagagcatgaaagatttcacgccagagcaggtggctgcccaaattccgcagctgaaggcgatgctggcgatgcgcaacttgcttcgcgatctcaaagctaagcgctttttcttctggtgcgttatcgatctggtcgaatgcacgagcagaaccaccgtaggtttttgccagaacggtagtgattgcagcggtcagggtagttttaccatggtcaacgtggccgatagtaccaacgttgacgtgcggttttgtacgttcaaatttttctttagacacggctatattccttactatagtgctctcccctttggagagagcacgggacttaggttttaatcctgtggattacttaccacgggcttcaataacggcctgagcaacgttgttaggcgcatcatcatacttcaggaattccatggtgtatgatgcacgacctttggtcagagaacgcagctgagttgcatatccgaacatttcagacagtggaacttcagcgtggatcttaacgccagtcacttcggattcctgaccacgcagcataccgcgacgacggctcaagtcaccgataacgtcaccggtgttctcttcaggagtttctacttcaaccttcatgattggctcaagcagaactggttttgctttcttaaagccttctttaaaggcaatagacgcagccagtttaaacgccagttcagaggagtcaacgtcgtggtaagaaccgaagtgcagacggatacccatgtcaacaaccggatagccagccagagggcccgctttcagctgttcctggatgcctttatcaacggctgggatgtattcgccaggaattacaccacctttgatgtcgttgatgaactcgtaacctttcgggttagagcccggctccagtgggtacatgtcgatcacaacgtgaccgtactgaccgcgaccaccagactgcttagcgtgtttaccttcaatatcggtaactttcgcgcgaatcgcttcgcggtaagcaacctgaggtttacccacgttcgcttcaacgttgaattcacgcttcatacggtcaacgatgatgtccaggtgcagttcacccataccagcgatgatggtctggttagattcttcatcagtccatacgcggaatgatgggtcttctttcgccagacggcccagagccagacccattttttcctggtcagctttggtttttggttcaactgcgatggagattaccggctctgggaattccatacgctccagaatgatcgggtgatccgggtcacacagggtgtcaccagtggtcacgtctttcagaccgatagctgcagcgatgtcgcccgcacgaacttctttgatttcttcacgtttgttagcgtgcatctgtacgatacggccaaaacgctcacgcgccgctttcacggagttcaggatggtgtcaccggagttaaccacaccagagtaaacgcggaagaaggtcaggttacccacgaatgggtcggtagcaattttgaacgccagtgcagagaatggctcttcgtcgcttgcgtgacgctcagccggggtatctttaccgtcgtccaggatgccgttgatcgcaggaacgtcaactggggatggcaggtagtcaactaccgcatccagcatcgcctgaacacctttgttcttgaacgcagaaccacaggttaccaggatgatttcgttgttcagaacgcgctgacgcagagcttttttgatctcttcttcagtcagttcttcaccacccaggtatttctccatcagctcttcagaagcttcagcagcggattcgatcaggttctggtgccattcgtcagccaggtcctgcattgcagctgggatatcttcgtattcgaaggtaacgccctggtctgcatcgttccagttgatggctttcattttcaccaggtcgataacgccggtgaagccttcttcagcaccaattgccagctgcagcggaacagggttcgcgcccagacgggttttgatctgaccaacaactttcaggaagttagcacccatacggtccattttgttaacgaacgcgatgcgtggaactttatatttgttcgcctgacgccatacggtttcagactgtggttgaacaccaccaactgcgcaataaaccattaccgcgccgtcaagaacacgcatggaacgttctacttcgatggtgaagtcaacgtgccctggggtgtcgatgatgtttacgcgatgcggttcgtactgcttagccatacctgaccagaatgcagtagtcgctgcggaggtgatagtgataccacgctcctgctcctgttccatccagtccatggtggctgcgccgtcatgaacttcaccgattttgtggtttacaccggtgtagaacagaatacgttcggtagtagtggttttaccggcgtcgatgtgcgcactgataccgatgttacggtagcgtgcgatgggtgttgtacgagccatttgattcctcgtttatatctttaggcgttcagttaagttacccagagcgggcggcttctctgaagcgcccgcctggtgactaagactccgaagggattaccaacggtagtgtgcgaacgccttgttggcttctgccatacggtgaacgtcttcacgtttcttaactgcagtacctttgttgtctgcagcatcagaaagttcgttcgccagacgcagagccatggatttatcaccgcgtttacgagcagcttcaacgatccaacgcattgccagggcattacgacgaaccggacgaacttcaactggaacctgataagtagaaccaccaacgcggcgggacttaacttctacagttgggcgaacgttgtcgagagcgacttcgaaagcttccagttcatttttaccagaacgctgagccagggtctccagcgcgctgtatacgattgcttctgcagtagattttttaccatctaccatcaggatatttacaaattttgccagcagttctgatccgaatttcggatctggaagaattttacgctgaccaatgacgcgacgacgtggcatgggaatactccgttgttaattcaggattgtccaaaactcaaagagtttagtatgacattaagataaatcagtttggccttacttaacggagaaccattaagccttaggacgcttcacgccgtacttggagcgagcctgcttacggtctttaacacctgagcagtccagcgcaccacgaacggtgtggtaacgaacacccggaaggtctttaacacgaccgccacggatcaggatcacggagtgctcctgcaggttgtgaccttcaccaccgatgtaggaagtcacttcgaaaccgttagtcaaacgcacacggcatactttacgcagtgcggagtttggttttttaggagtggtggtatatacacgagtacatacaccacgtttctgcgggcaggcttccagcgcaggcacgttgcttttcgcaactttgcgtgcacgtggtttgcgtaccagctggttaactgttgccattaaatagctcctggttttagcttttgcttcgtaaacacgtaataaaacgacctcatacaatatgaggacgcgaaattttagggctacgtcgaaaaggtgtcaagaaatatacagcgatctcaaatcaccagttcatttgactggcgtgcgtcacagtaagattgacgaaatcagtatagccaaccacgtcaattttggctgaaatttgaccagaaagaccccgcgcatccagatcgtctttcagcgcagaaactgttatgggggcattcgtgagcatttcaacgaaacggctgccttcaagtgcagcaagcacgccgtcctgaatcagcaacaggtcatcaccgtcgcgcagcatactcagtaacgcgtcgatatcacattgccatggtgaatggctcagagtatggagcatggcagcctcagaaagtcagaacggtgtcgtagtgggaaaggtgttcgcgcattgcctcagaagacacgacggtcacatccagcacgaaaggcgtcttctcatccaaaccgcgagcggccagcgagtcggcgcagacataaagggtttcaatgtcatacagcggcagcactttaaacgtagcgatgtaatcccgcgccagaatggcctgtggctgctgacccgccagaagctggaacacaccgtcccctaaaaagaagacgccgatatcttcggtcagcgcggacgtcgcaagtaacgcatccagtccttcgcgaccagaagcgctcccgtgcggcgcagacgcaaaaacaaatgccacgcgcttcatcagaattgcaccactctgtcgcaggtgagcgccgcctgtgccagcgcgcccagaccgcttaacgaaaaaccgggctggaggttagaacccgacaaacctagacgggcggcttcggttgcatcggtcacgccgcggcgcagtgccgccgccacgcagatgtgcagttctacgccctgcttttcgtttaatgcctgccagccgcgcaccacatcaaactcatcgctcgccggcgacgtaaactggttcgcgttatacaccccttcccgatagaagaagacgctcgccagctcatgtccggctgccagcagcgcctgcgcaaactgcagcgcgctgctggcctgctgagtcccgtacgccgggcctgtcaccattaacgcataacgcattacttgtcttgtcccaggaaatcaccgcttttgaactggcgaatatagaggtagaccgtgtgcttggagatgttgagacgatcggccacctggttgatggcgtctttaatatcaaaaatccctttttcatagagattgagcacgatctggcgattcttggcgttgttcgagacgttgcggtcggcattcacctcttcaatggtgaactcaagcgtctgcgtgacgagatcttcgacggaagaggcaaagttaacagaagagccaacatccggcgtttctggtggaataaaggtgctcatgatctgcgagaaaggcacatcaaggttcatgttgatgcacagcagcccaataacacgatgctcgcggtttcgaatcgcgatggtttctgatttcatcagcacgccgcttttggcgcgggtgaaatagcatttggagacgctgctgtccgcgccggtcatgtcatgcaacatacgcaatgcaaggtcggtaattggcgagccaattttacggccagtatgctcaccattcgcaatgcggatggcggaacacttcagatcttgcagggagtgcaatacgatttcgcagtgggagccaatgagcatcgctaacccgtccactaccgcttcataggatttcagaatatcgaagtcggtctggtcaaaaggacgttgatccagcaaatcaagttcactggtttcgttggttaaaagcgacctggacatgaaaaaaacactccttttcaggagcctgtcgttaggttttcagggcaggctcattatctacacggacaactaaattaatacagcgtgcctaacgctttccagtgttaattatatctgccccacaataaaaaaccgccgccttaaaggcggcggttttttttcagcattacttcttagcagcagcggctttatcgtcagccggtgcgtctgccttggcatccgctttcggtgccggtttgatgtccagcagctctacgtcaaagaccagcgtagagttggcagggatccccggaacgccggttttgccataggccagatccggtgggatgaccatcttgatcttgccgcctttcttgatgtttttcaggccttcagtccagccagggatcacaccatccagacggaaggagagcggctcaccacgggtgtaagagttatcgaactctttaccgtcgatcagcgtacctttgtagttcacgacaaccgtgtcgctgtctttaggcgcatcgccggtgccttctttctcaactttgtacaccaggccagtcgaagaggttttcacacccttctctttagcgaaggcatcgcggtaggctttgcctttcgcttcgttgtctttagcgtccgcgtccatcttagtctgcgcggcgcccttcacacgcgcttcgaacgcctgcagagtctgttcaatttcctggtcagacagcttgctcttatcggcaaatgcgtcctgaacgcctgcgatcagctgagctttatccagtttgatgcccagtttctcttgttctttcagagagttttccatgtaacgacccagagatgcgcccagtgcgtaggcggatttctggtcgtcatttttgaacgctgctttgctgtctgcagtggcagcaggcttcgcagcagtatcagcagcgaatgacagcggcgcgttcagcgcaacagccatcgtcgtcgccagcagcgttactttaaacagtgatttcatccatatctccagggcctggggactctcaccccagcgttaaacgtaaatgagtgacgtactataaaacgttgcagaagaaatctacagacagacacgtccaattctcgccacttttcagactatttttgtttaaataagtttcttgccagagggatgcgaactgtacttaaggataaactcagttaaactgcgccgccgctgggccattatggcgaatctgaaataaacaaggtgaatgatgaaggatacagcattagaagcgagaatggctgagctggaaagccgcctggcttttcaggacatcaccatcgaagagctaaaccagaccgtgaccgcacatgaactcgaaatggcaaaactacgggatcatatgcgcctgctgacggaaaagctgaaggctacgcagccgtcgaacatcgcctctcagtcagaagagacgccacctcctcattattgaggcgtaaaaaaagcgggataatcccgcttttttattttccgcatgacggaattagtggcagccgcagccgccgttaccgcaaccacctttaccgtggccgtggtcatgaccatggtcgtggccgtgaccaccgcagcagccgtcgtggccgtgatcgtggtcatggtcgtgaccgtgcgcaccgtgaacgtggccatgagccagctcttcttcggtcgcttcgcggatcgcaacaacttctacgttgaacttcaggttctggccagccagcatatggttgccgtcaaccacgacgtggtcatcttccacttcggtgatttcaacaggaaccgggccctggtcggtttccgccaggaagcgcatgccaacctgcagttcgtcaacgcccatgaacacgtctttaggaacgcgctgaaccaggttgtcgtcatactgaccgtaagcgtcgttcgcgcctacagcaacgtcaaatttgtcgccaacttcatgaccttccagcgcgttttccaggccggaaatcagggaaccgtgaccatgcaggtagtcaagcggcgcactcaccggagactcatcaaccaacacaccgtcttctgtacgtacctgataggccaggctgaccaccaggtcttttgctactttcatgatatctcctgagcgtgggaaaattgctggcgcagattgtagcggaaatctgcacctgtgtaccctttagcttaaaaaaactcagggcatatcgctagtccggatgaaaaatcccgataacttgctcttctttgcgaacgtgctcgcgcgcctctttgtcggcctcacgcatctggtgaccgcacttaacacactcaacaacatcaatattattttcccgccacatcgccagggtatcttgcgcctggcaggtcgggcattttgcacccgcgataaagcgtttacgtacagccatctttcgttaccctttattcaaattcatcccagccatcgagctggcgtcgttcctgctgcatctcgcgctggaagatctcctccagctcgcgacgggcttcccgcacgcgggagatctgcgccgtatcggtatgtaccggcatcagctcgcgcagcatccgcatatccagccggcggaagtgcatctgggcgcgctgcgcctgatgcggatgcatgccaagcgagatcagcgccttgcgccccagctccagcgcgctggagaacgtctcacgggagaagtgtttcacacccgcctgcaataattcgtgagcttcaacacgtccccgcgcacgcgccagaatatgcagatgcgggaaatgctgctggcagagatccaccagcttcatcgtgtcttccgggtcgttacaggtaatcacgatggattcggccgcttctgcccctgccgaacgcagtagctcgagctgggtcgcgtcgccgtagtaaaccttatagccatatttgcgcatcaggttgaccgcgctgatatcccgctccagcaccgtaatgcgcattttgttcgccatcagcaaacggccgattacctgtccaaaacggccaaagcccaccacgatcacctggggcttatcgtcttccacccacggcgcttcgtcttcgtcgtctgccgggttcaggcggcgcgacagcagtctatccaccagcttcatcagcagcggcgtggtcatcatggacagcgtgaccgttaccagcaaaagcgccatctgatcgtctttaaacagcttctgggacgaggcggtagagaacagcacaaacgcgaactcgcctccctggctcaacacgctcgcaaactgcatgcgctccgagctgcgcaggccgtaaatgcgcgccataacgtacagcaccagcgttttcaccgccaccaggatggccacgctcaccacaacccacaggagatgggtataaagcacgccaaggttgagcgccatccccaccgaaataaagaacagccccaacagcaatcctttgaagggatcgatggcaatttccagctcgtggcggtattcactttccgccagcagcaccccggcaataaaggtcccgagcgccatcgacagccccagcgcgtccataaacaatgccgaccccagcaccagcagcagcgtcgcagcggtaaacacctcgcgcacgccggacgcggcaataaagcggaatacgggacgtaacaggaaacgtccgccaatcagcatccccgcgaaggcaagcaccttcatcgcgattttcgcccagtcgaagtggtcgtcgccggagcccgccagcagcggcaccagcgccagcgccgggatgaccgccaaatcctggaacagcagcaccgaaaaacccagctgaccggcttcgttacggttcatccctttgtcgcgcatcagctgcagggccatcgccgtcgacgacatcgcgaggcctatcccgccgatcaccgccgcctgccaggagaaattcgtcagcattagcaggccgcccagaatagcggcactgaacaacacctgcgcggcgcccacgccaaagatggagcgtcggagttgccacaatttcgaaggattcagctccaggccgatgatgaacatcaggaacaccacgcccagctcggagaaatggagaatttcatccacatcgctgatgaaacccagtccccatgggccaatggcgatccccgccagcaaataccccagtaccgcaccgataccaatacgcgctgcaagcggcaccgcgacgacggccgcaaataaaaacagcaccccggcgaggagcaaattcgatccttccattaacgccctcctgccggaatcggtgacgccagccattcaccgtaggctctggcgtggctggccagctctttcggatcctgacgacgggcccagtagacaataatcgggctcatccagtgcatacggcacatggccgccgtcagctcaaaaggccgcagaatgtcgctcatcggatagcggttcagcccgtcgtggcggtaggcgctttcgggttcaccggtcgtaatcacactacgccagtactttcccgccagctggttgccccccaccccgctggagaagccccggctcagcacgcggtccagccactctttgagcagcgccggacagctgtaggtataaagcggatgctggaacacaatcacgtcatgctgacgcagcagttcctgctcgtaaggaatatcaataaagaaatcaggatagtgcgcgtagagatcgtgcaccgtcacgttactgagctgtgtggccggcttaagcagcacccggtttgccaccgagtcctgagattccggatgggcatacagcagcagcacttttgctgtctgagacatcattcccctcccggtcttgtttctgtttttgtgtatcgttgttgttttgggctaccatggcggcccggtgcggaaaatggcccacaccttacattatcataatgacaaattaacatagtcggaacatacggcgcttctatgattgttttctcctcgttacaaattcgtcgcggcgtgcgcgtcctgctggataacgccactgctaccatcaacccgggccaaaaagtgggtctggtcggcaaaaacggctgtggtaaatccacgctgctggcgttgctgaaaaacgagattagcgcggatggcggtaacttcaccttcccggggaactggcagctcgcctgggtgaaccaggagacgccagccctgagcgaaccggcactcgactatgttatcgacggcgatcgtgagtaccgtaagctcgaagcggaactcaatgccgcaaacgagcgcaacgacggccacgccatcgccaccgttcacggcaagctggacgccatcgacgcgtggaccattcgctcccgcgcctccagcctgctgcacggcctgggcttcagcaatgagcagctggaacgcccggtcagcgacttctccggcggctggcgtatgcgcctcaacctggcgcaggcgctcatctgccgctctgacctgctgctgctcgatgaaccgactaaccacctcgatctcgatgcggttatttggctggagaagtggctcaagagctatcagggcactctgattctgatctcccacgaccgagacttccttgacccggtggtggataaaatcattcatatcgaacagcaaacgatgttcgagtacacgggcaactacagctccttcgagcgccagcgcgcgacgcgtcttgcccagcagcagtccatgtacgaaagccagcagcagcgcgtggcgcacctgcaaagctttgtggatcgcttcaaggccaaggcgtcaaaggcgaagcaggcccagagccgcatcaagatgctggagcgcatggagatgatcgccccggcgcacgtcgacaacccgttccacttcagcttccgggccccggaaagcctgccaaatcccctgctgaaaatggaaaaggtcagcgcgggttatgccgaccgcattattctcgactccatcaagctcaacctggtgccgggttcacgtattggtctgctcgggcgcaacggtgccggtaaatccacgctgatcaaactgctggcgggcgagcttaatccggtcaagggtgaaatcggcctggcgaagggcatcaagctgggttacttcgcccagcatcagctggaatttttacgcgcggatgaatccccgattcagcacctcgcgcgtctggcgccgcaggagatggagcagaagctgcgcgactacctcggcggcttcggcttccagggcgataaggtcaccgaaaacaccgagcgtttctcgggcggcgaaaaagcccgtctggtgctggcgctgatcgtctggcagcgcccgaacctgctgctgctcgatgaaccgaccaaccacctggatctcgatatgcgtcaggcgctgaccgaagcgctgattgagttcgaaggcgcactggtggtggtttcgcacgaccgtcacctgatccgctccaccacggacgatctctacttagtgcacgacggcaaagtcgaaccgttcgacggcgatctggaagactaccagcagtggctgacggacgtgcagaagcaggagaaccagccggaggagtcggcgaaagacaacgccaacagcgcgcaggcacgtaaagaccagaagcgccgtgaagcggagctgcgcacccagactcagccgctgcgtaaagagattgcccgtctcgaaaaagagatggaaaagctcaacgccacgcttgctaccgttgaagagaagctcggcgacagcggtctgtatgaccagagccgtaaagccgaactgacggactgcctgcaaacccaggcgaagaccaaatccagccttgaagagtgtgagatggcgtggctggacgcgcaggaacagctggaagcgatgctgcaggctgactgataccgggagggctatgagtttcgataacacgagcgagattacattccgcaagctcagcatcttcatgacgtttatggagaaggggaatatcgcgcgtaccgccgaaactctgggcctgagcggcgtcagcgttcaccgtgcgctgcacacgctggaagagaacgtgcgctgtccgctctttacccataaggggcgcaacctgattgctctcccttccgcctggaccttactggaatattgtcaggaagtgatgcaggtgatggagcgcgggctggaagcgtcgcgcaaaattgccgggatcggccaggggcggctgcgagtcggaacgctctactcgctcaccctggaaaccgtgccgcgtctgatcatgggcatgaagctacgtcgtccggatctggaaatggatctgacgatgggctccaacgaaaccctgctgcacatgctggatgaaggctctctggacgccattcttatctccatttccgagagcgatatcgaccgtaacagcctggaagtgctcccgctgttccatgacgacatcttccttgccgcaccggcctccgcgacgctcaacacccgcggcccggccgatctgcgcgactataaagatcggaaatttgtctctcttgcggaagggttcgccacctatgcaggcttccaggaggcgtttcatatcgccgggttcgagccggagattgttacccgggtgaatgacattttctccatgctcagtctggtgcaggcgggagtgggctttacgctgatgccgggcaggatgaaaaaggtctatgagaattccgtgcagctcctgaagcttgccgagccgtaccagatgcaacagctgatcgccatcgtctttgcccgcaaccgcgagcaggatccaagcctgcgggcgctggccgccgaagggcggatgtatgcccgcagtttgcaggatagtgcctgatgttattgcccggtggcgctacgcttaccgggcctacagtccgtagtaggcccggtaaggcgcagccgccaccgggctaaaccatcacgcacggagtcgcttcgccagatgtaccgccacgtccaccccgctgcgctccagtgaaatcgtctctccttcccacggcgcctgacgcgtcaggcaggtcagtacgccgccggggggcatctcgatcgccagccgggcttcgcgttcattcgctgaaatcatcgcctcctgccagcgcaccgtacgcgccatgttcatcgccagatcgtcggcgatcttttccggctgccacaacacgcgcccggtgctgccgctcaggtaggcgcagcgtgggcgtgaaagcgtgaccgattcaaacgccgttgccagcttttgcgcgggtgctgtcagcagttcgcagtgcgacggcacgctgaccgccagccgtttggccttgctcgcccctttcgccagcgcgcgcgacgccgcctccgccatcccttcatcggttccggcaatcacgatctgcgtttcggcattcaggttggcaatgtaggtcccggtgccctggataaggtcttccacctgcggcagagtgagccccataattgccgtcaggccgtagccgtgcggatacgcctgctccatcagatcgccacgcagcgccaccagcttcagcgcatccgtgaagtccagcgcgcctgcaatgaccgccgccggataagcgccgatggacagcccgctgacgatatccggcgccacgccgcgccgttccagctcgcgcgcccaggccacgcctgcaattagcaggcaaagctgaaccgcgcgggtatggcttaacgcgtctgcgctatccagcgtgtccacttcggtgccaagcacctcacgcgcctgagccagttccgttcccggcaggttttgcagcatgccttcgtgctgcgtgccctgccccggaaaggtaaacactattttcatcactcctccctgcgccacggatccgccaccaggcgcggtccacggcgggttttcagcagcgttttgccgtcgcgcagccactccgccagcgcgaaaccgccctcgggcgtatccacctgcgtatcggcacgacacagcgcacggcttagccgggactgccacgtcgtcagggcgtccggtgagatcggcagcggagcgcggataagcagatcgagatcgctgtcggcatggatcaccgggataccggtcgccagcgcgtagccggtactgccggtaatgccccacgtccacggccacgcctgctgagaaagctgaagcgccacctgaacgggtggctgagtcacaaagggcgagcgcagcagttcggccgcaacgctcagatcttctggtgaaaccacgcgtaacacgttttcgggcttcccccatccggccgcccgctggtcgcgacgtaaaccgcgcacgccaacggggatccggccttcgctatccacatcacgccgcaccaccaccggcaggccggtatgccaggcggcctccacccaggattcagtgatgccttccagcgcatcgcgggaagtaagccagataaggtcgtgcgggcgtaatagggtggtcatggttacattcctgaagttagcgagataaacagcggcagcgacaggatacacaggacggagcttaacagcagcacggcttctgcatccggcgactgcacgccaaagcggttaccgaacacgacgccgaagaagcccgcggagagcgcaatcatgaggatcgcggtgatcgccacggagccatgcagaccaaagatcaagacgataccccaggcgatggcaggctgaatcagcagcttggcgatggtggaggtgatcaccatggtgttgatctgcagcttacgggcagagaggatcaccccggtcaggaacagcgccgcagcggtcgcggacagtcccagcggtttaatcgccgccagcaccagctccggcattttgatgccgatggcggacaaaatcacacccagcagcgggcccatcacgatcggctttttaatggagcgccacatcagcaccggcagcatggaaagcgttgaaccggagttattgccctcggcgcgcgctttttcacgctcaagaatgagcaggcagaacggggtcatcaacaccgaaccgcaggcgatggagaccgctacggagagcgacgtagaggaagcctcccctagtacgctgcccagaatcggcagacccagcgctgcatagttgggcagcgcgacggtgagcgtcagcacggccgcatcctgtggcgacttcttaaagacgccggtggcgaggaagtagatggccgcataggtgatccacatcgccagcgtcagcaccaggatcagcggcgactgggctacgatgccggtccatggcgtttgcacggtagcgctgaacagcgcggcaggcagtgcaaaatccatcacgaagatattaagcagggaaacatttttgttatcgaccatctttgccttgccggcccagaatcccagcaacatgatgacgaaaatcggtgcaagagcatgaacaattacgtaagtcataaatcacctgtagtaaaaaagttatagcactggcgcgatgattattattttcaggatgcaggttcccgcgtgggcacagtcacgtgcccacgggttgatgcatctggcaggtctctttttacttaccagctggctcgcatacgttcgcgtacaagcgccgagctgcggcgattgtcagcacccagacggtttttcaacgtggtgtcctgacgagcgttactgatggcatgttgcagggtggatttcaccagcgtcagatcgttatcggacggggcatccgggttgctgatatccagcaggttagagagcagccccagcgtggcgtagttgctgatgtcgtacgccatgggcggaatggttgccgccagtttttccagcgcgtcgacggtgcgcagcgtaatgcgcgccgcagactctttgcccatcgcgtggatcagcacgcctttgtcgttaaaggcaatcaggcggttggcctggtagccgtgcgccagaaacgcgccggacatcgccttgccgacgataagcccaatcaccgggtgaccggccagacgcgcattcgcataggctgctgccgcaccggccagcgcctgatgaataccaaacgcctcttcacgacggccataggcctggcttgggacgtcgatcaccgccactatcgggcgcttcacggctttatcggcatccgccgcgacggtttcactgaccactttcgccagggtccagccttccagcagccccacttctcctttcgccgcacgcgggaagtggttgttggcatccggcaccacggcaacaaagcgcaccgcctcgccgtttagctcaccatctgccgcctggacggacgggcatagcccttcgatacgtttggcgttcggagcgaggatttccagccagcgttcgccacggcttattgcgttactcatcatttcacctcccgggcaaaaagcgcgttaatttgttcggcatcagcctgtttgcgggtgtcaaaatgggtcagacgggcgaggtaatcatcgtagttatcggtgcgatgtttcgcgggaacgcctttagcaatcgcgtcgttcatcgcctgtttcaccgcgttgataccgtcgccgacgagcgcatccaccagcccgctttgatagcgcacttcaccgccggtcatgctccagataaacggacgatcgcgggagtcgtactcctcaatgcccgcctcctgctcgataacctgcgggccgttgaggccaagacgcgcttcgcgggtcacaatcaggtagctgcacagcgccgcggcgatggacatcccaccgaagcagcccacagtcccggccacaatcccgataacgggcgtgtagcgacgcaggtcgacaatcgcagcgtggatatcggcaatcgccgccaggccgaggttcgcctcctgcagacgcacgccgccggtttcgaggcacagcaccgcctgagtcggaatgccgttgcggttatcttccgccgccagctccagcgccgccgccattttggcgccggagacttcgcccatgctgccgccctggaacgcgccttcaatcgccacgacaacggccggcttgccgttgatggtgcctttcgccaccaccatgccgtcgtccgcctgcggcacaatgccctgtggcccaagccacggagagataatgccttcaaacggatccagcagttcgcggtagctgccctcatcgagcagggcctgcgcgcgctggcgcgctttcagttcgataaagctgctgtcatcacgcatggctcaccccctcaaaaacctgttcgatgcgaatgcgcgccacgcccggcgtcgcgccgaagtcgtggatggtcagcttccctgcgggcaggctgctgacggtttgcagacggttgaacagcgcctcccagcgcccccggctgttatccacggaggtggtgatatcaatggttaacgtctggcccggttcggcggtgaagagcacctccatatccccggaaccgactacccctgccagcgccctgccgcttaacgtgcggctggctggcacggtcaatgtgattttttccataacatcctcttaatgctttgaatttggcgtttcgacgcggtcgagaaacagcgtggcggcaagcaggtcggcagcgccgcccggtgaggcgttgagcgccagcatctgacggtcaaacctcgccagcgcctgctggcccgcaggcgttgcgctgccgccggcattcagcaccgcacgggcgccgtcctgcatggcatcaagcccttccattccggcacgtgacagcacgcaggtgtcggtgagtgaggtcatgatggccatcagcgcgtcgagcctggcgtgcgtttcactgctaccgttgaggcggctcagacgaagctgcggcagcgcgcgctgcataacgtgcggaaacgcctgctgcgcttcttcacgcgcgcccggcacgcggtaacggtgcgtggcgcgcaggcctttactgaacaccttcggcgccgcgtcgtccggcagtctcgccagctgtgcggcggtgcgggcggcgtcttgcgccctggcatcaccgccgagcatcgccatcgcgctgaccagcaatcccagcgcccaaatcgcgccgcgatgggtgtttacgccaccggttgcggacatcatctgctgctcgccttcgcgaccgagtcgcccgacggtttgccgaagtgcgatatctgccgggcgctgccagctttgcagcgccagcgcctgaaatgtggaggtcaggctgtgcgcggagcgctccatcagcgcaagggataaatcgtggtgcgcgccgttcccccgactgtccaccaggccgggtttcgggcttaaacgtgcttcgtcaatcagacactgcgtggcggttcgcgccagccattcggcaccgccttcaacctgaatctgggggagaagtttcattaccagctccggaatttcgcaggtgggttatagagaccgccggaccattccacgagatcagacacgctgcctgccgccagcagagaccgggtggcatcagtgcggcgaatccccatatcttccggatagaccaccttgccgctctgacgcagctccgccacgcgtttggcatccacgcccagcccgatgtcggtgatccccgcgacggcagcgaccatggcacgacgctcttccagatctttcgcccgatagaggtaggcaatcccctcttccgtcagcacgtgggtgacgtcatcgccgtagatcatcaccggcgccagcggcataccggaggctttcgccacgtcaacggcatcgagtttttccacgaaggtcggcttcacacccgcctggaaggtttccaccatctgcacgaccagttttttgccgcgctgcattgggtcaggttcggtgatcatgttcagccaggcgggcgtggcgtggcgacgaccgtgcgggtcgtgacccatgtttggcgcaccgccgaagccggacagacgaccgcgggtcacggttgaggagttggcgtagccgtccacctgcagcgtagaaccgatgaatatatccaccgcgtactgacccgccagctggcagaacgcgcggttggagcgcatggagccgtcggcaccggtaaagaagacgtccggacgcgcgcggatgtactcttccatccccagctcgccaccgaagcagtgcacgctctcgacccagccgctttcaatagccgggatcagcgtcggatgcgggttcagcgtccagtgtttacagattttgcctttaaggccgagctgttcaccgtaggtaggcagcagcagctcgatcgccgcagtgttaaagccgatcccgtggttcagggactgcacctggtgttcagcataaatacccttgatggccatcatcgccatcaggatgtgttcctgtttaatcaggcgcgggtcgcgggtaaacagcggttcgataaagaacggcttatcggcaaccaccacgaagtcaatccacgagcccggaatatccacgcgcggcaggtcacactcgtcatccaccagctcgttcacctgcgcgatgacgatgccgtcatggaacgcggcggcttccaccagcgccggggtatcttcggtgctcgccccggtatagaggttgcctttgcggtcggctttaaagccggcaatcagcgccacgttgggcgacaggtcgacgtagagacgggagtagagttcgatataggtgtgaatcgcgccgatttcgagctgaccatcctccagcagctgggagatgcgcaggctctgcgtcccggagaaggagaaatccagcttgcgggcgatgcctttctcaaagatatccagatgttcgctgcggccaacgctcggcatgatcatatgcagatcgtggacgatctgcgggttcacttcggccagcgagcgggaaaggaaatcggcctgcttctggttgttaccttccagcacgaccttgtcgcctggcgcgatcagtttttccagcatggcgacgagatcgccggttggcagtaccttgccctgcaccggtacggaggccagacgacgcgctttttcgctgcgtcgcgtgttccattgccgggtgggtgtttgcccagataacattattaacctcctgattcagctaatcattttgatttgcttaacgttgaataaagtgtgcgctctggtgagaaaggcatcaattaagcgtagagctgaatcattagcctgagagtaataatcaaggtaaatatttgtgatcgggatcagttcatgtttcggaaatccaggctaaacggggtacaattcggaaagtatcgtaaatttccgacaagaatcagcatcgcgcctatgacccaaatcattccatcaggcttcgacattgccgccgaagacagcactgagttcgtgcctatgcgcggcgtcgccaatcgccatttgcagaccatgctgccgcgactgatccgccgcaaggttcagttcaccccacactggcagcggctagatctgccagacggtgactttctggatctcgcctggagcgaagcgccggatcaggctcgacataagccgcggctggtggtttttcacggtctggaaggcagcctgcatagcccgtatgcacacgggctcattgaggcggccaaagcgcgcggctggctcggcgtggtgatgcattttcgcggctgcagcggcgagccgaaccggcagaagcgtatctatcactcgggtgaaaccgaagacggcacgtggtttttacactggctgcgggacaactttggcaccgtgcccaccgcggccgtaggctactcgctgggcggaaatatgctggcctgcctgttagctaaagaaggggaaagcgtcccgctggatgccgccgtcatcgtctccgccccgttcatgctggagcagtgcagctaccacatggacaaaggcttttcccgcgtctatcagcgctacctgctcaacctgctgaaggccaacgcggcgcgtaagctgaaagcctgcccggacaccctcccggtaagcctgcgccagctgaaaaaagtgcgccgcatacgcgaattcgacgatctgatcaccgcgaaaatccacggcttcgccgatgcgattgactattatcgtcagtgcagcgccatgccgctgctcagcaagatcacgcagccaacgctgatcattcacgccaaagatgacccttttatggatcatcactcgattcccgctcaggaattcctgcccgacaacgttcactatcagttgaccgagcacggcggccacgtcgggtttatcggcggcacgctgcgccgcccgaaaatgtggcttgaggcgcgtattcctgactggctaaccccttatctggacggtgcaacatgattattccctggcaggatctggctcccgaaacgctcgataatctgattgaaagctttgtattacgcgaaggcaccgattatggtgaacaggaacgctcgcttgagcaaaaggtcaacgatgtaaagcgccagctgaaaagcggcgacgtggtgctggtgtggtcagaactgcatgagacggtgaatatcatgccccgcaacgcgtttcacggctgatcttccacccttttcagtcagggagttgctatgtctgccagacatccggttattgccgttacggggtcaagtggtgcgggaaccaccaccaccagcctcgcatttcgcaagattttcgcccagctgaatctccgtgcggcggaggtcgaaggcgacagctttcaccgctacacgcgcccggagatggacatggccatccgtaaggcgcgcgatctgggtaaacacatcagctacttcggtccggaagccaatgacttcggcctgctggaacaaacctttattgagtacggccagagcggtaaagggcagtcccgcaagtatctgcatacctatgatgaagccgttccctggaatcaggtgcctggcacctttaccccctggcagcccctgccggaacctaccgacgtgctgttctacgaaggattacacggcggcgtggtcacgccgcagcacgacgtggcgcgccacgtggatctgttggttggcgtggtgcctatcgttaacctggagtggatccagaagctgacgcgtgacatgagcgagcgcggccactcgcgcgaagcagtgatggattcggtggtgcgctccatggaagactacatcaacttcctgacgccgcagttttcccgcacccatatcaacttccagcgcgtgccgacggtggacacctccaacccgttcgcggccaaaagtatcccatccctggatgagagctttgtggtgatccatttccgcaatctcgaaggcattgactacccctggctgctggcgatgctgcagggctcgtttatttctcacatgaatacattagtcgtaccgggcggaaaaatggggctggcgatggagctcatcatgacgccgctggtggagcgactgatggaagggaaacagatcgcgtgagttttttgcccggtggcgctgcgcttaccgggcctacggtcgtgcttttgtagggcgggtcagcgaagcgccacccgccaaaagattaagcctcgatcacttcatacgaatgggtgatttttaccgctttctccagcattaacgccacagagcagtacttctccgcagacaggtccaccgcacgtgaaaccgccgcgtctttcagttctttaccggtgaccacaaagtgcagattgatgtgggtgaacaggcgtggcgcctcttcgcggcgttctgacgtgagtttgacctcacaatccgtcacgtcatgacggcctttttgcagaatcgacaccacgtcaatggcgctgcatccccctgccgccatcagcaccatttccattgggctgggcgctttatcgccggagttaccatccatcaaaatctgatgccctgacgcggactcgcccaggaacgttaaaccttcaacccactttacgcgcgcttgcatattcttaaactccaacgttgcatttttggtgacagattacgcgtgcgttacatttctcgcaatggaaggcgacctgcatcatgctgaagcgagacaccaggagacacgcggcgaaagctatgctaaaacactcaggatgctacagtaatacattgacgttacacatgtatgcagaggacatcaaactttactggctgcgaaacgttacggtagccgacttcccagggtatgggtaagaattcgattgcaaccccagagtccggatgcatctgatgactctggtgacagcttataacagaggataacagcgcatggtgcttggcaaaccgcaaacagacccgactctcgaatggttcttgtctcattgccacattcataagtacccatcaaagagcacgctgattcaccagggtgaaaaagcggaaacgttgtattacatcgttaaaggctcggtggcagtgctgatcaaagatgaagaagggaaagagatgatcctttcttatctgaaccagggcgatttcatcggtgaactgggcctgtttgaagagggccaggaacgtagcgcctgggttcgtgcaaagacagcatgtgaagtggctgaaatttcttacaagaagttccgtcagctgattcaggttaaccctgacatcctgatgcgtctctcttcccagatggcacgccgtctgcaagtgacctctgagaaggtaggtaacctcgccttcctggacgtaaccggtcgtatcgcacaaactctgctgaacctggcgaaacagccggacgccatgacccacccggacggcatgcaaattaaaattacccgtcaggaaattggtcagatcgtcggttgctcccgtgaaacagtgggccgtatcctgaaaatgctggaagatcaaaacctgatctccgcccacggtaaaaccatcgtggtttacggaacgcgttaattccgcttaaacggcgtgccatcgcaaggtgtcacgccgtttttgtctctactcctcatgtggcgcaggctgatctatcacccggaagttaactacgcactgcgacaaacgctggtgttgtgtctacccgtggccatcggcctgatcctcggacaccttaagcaaggcctgctcttttccctcgtgcccgcctgctgcaacattgccggtctggacacgccgcacaagcgctttttcaaacgactgatcgtgggcggctgcctgtttgctggctgtagccttgccgtacagcttttactggcccgggatatcccgctgccgctgatcctgacggtgctggcgatgacgctcggcgtcacggcggaaatcagctcgctgcacgcccgcctgcttcccgcctcgctgattgcggccatcttcacgctgagcctcgccgggaatatgccggtgtgggagccgctactgatctacgcgctggggacactgtggtacgggctgtttaactggttctggttctggctgtggcgggaacagccgctgcgcgaatccctcagcctgctctatgtgcagttggcggattactgcgaagccaaatacaccctgctcacccagcataccgatccggaaaaagccttaccgccgctgctgacgcgccagcagaaggtggtggatctgataagccagtgctatcagcagctgcatatgctcgccgccaacaagaaccacgagtacaaacggctgctgcgcaccttccaggtaggcctggatctgcaggagcatatctccgttagcctgcaccacccgcaggaggtgcaaaagctggttgagcgcagccacgccgaagcggtgatccgctggaacgcgcagaccgtctcggcacgcctgcgcgtgctggctgacgatattctctaccaccgctatcccacgcgctttaacatggaaaaacagctcggtgcgctggagaaaatcgcccgtcagcatccggataacccggtcggccagtttgccgcctggcacttcagccgcatcgcccgcgtgctgcgcacccagcgcccgctttattcccgcgacctgatggcggataaacaaaaacggcttcccctgttgcccgcgctcaaaagctatctgtctctcaaatcgtccgccctgcgcaatgccgcacgaattagcgtgatgctcagtatcgccagcctgatgggcatggcgctgcatctgccgaagccctactggatcttaatgaccgtgctgttcgtcacccagaacggctacggcgccacgcgggtgcgtattctgcaccgggcgggcggcaccatggccgggctgatcattgcaggcgtaacgctgcacttccacgtgccggaaggctataccctggcaggcatgctggcgatcacgctggtgagctacctgattatccgcaaaaattacggctgggcgatggtgggctttacggtgacggcggtatacaccctgcagctgcttacgctgaacggcgaacagtttattatcgccaggctgattgataccctgatcggctgcctgattgccttcggcggcgtggtctggctgtggccgcagtggcagagcgggctgctcaggcagaacgcccacgacgcgctggaggccgaccagcaggccattcgcctcatcctgagcgacgacccgcagccctccccgctggcgtatcagcgcatgaaggtcaaccaggcgcacaacgctctgttcaactcgctcaaccaggcgatgcaggagccgggctttaattcgcactatctggcggacatgaagctctgggtaacgcacagtcagtttatcgttgagcacattaacgccatgacgacgctggcgcgcgagcacacgatgctgacgccggatctggcgcagcgctacctgcagtcgtgtgaaattgcgttgcagcgctgccagcagcgtctggagtatgactcaccgggcgagtcgggggatttaaatattctggaagcgccggagacgttaacccacgggccaatgagcaccctggagcaacacttgcagcgcgtgctggggcatctgaacaccatgcacaccatttcgtcggtggcatggcgtcagcgtccgcatcatggggtttggttaacgcgaaggttgaaacgaaccgaatattagcctttaacgatctttgcaaccgccgcggcaaagcgggttaagccgtcttcgatgtctttgtcttccaccaccagcgacggcgcaaagcgcatcacgtccggcccggcgttgagcaccatcaccccttcgcgagcggcggcgtgcaggaaatcacgcgcgcggcccttgtactgcggcttcagctcggcgccaatcagcagccccatcccgcggatctcgctgaacacgtcgtactgctcgtcaatctgcttcaggtgcttcacaaacagctcgcgcttcgcgctaacgccgtttagcacctctggcgtgttgatgatgtcgaacgcggcacccgccacggcgctcgccagcgggttaccgccgtaggtagagccgtgagaaccgacgtgaaacgcggaggcgatctcctgcgtcgtcaggaccgcactcaccgggaaaccgccgccgagcgctttcgcgctggtcaaaatatccggcgtcacgccgtagtgcatataggcaaacaggtccccggtacgccccatcccgcactgcacttcatcaaacaccagcagcgcctgatgctcgtcgcacagcgcgcgcagccctttcaggaattccggggttgccgcggtcacgccgccttccccctgaataggctcgaccaccaccgcgcaggtgtggtcgtccatcaccgctttcaccgcgtgcagatcgttaaacggcacgtggatgatgtcggctggtttcggaccaaacccgtcggaatacttcggctggccgccaacggagacggtaaagaaggagcgcccgtggaaggcattgtggaaggcgatgattttggttttgtacgggctgtggcgcgtggtcgcgtagtagcgcgccagcttaaaggcggtttcgttggcttcggtgccggagttcataaacagcacgcgctcggcgaacgtggcatcaatgatcttacggcccaggcgcagcgccggttcgttggtgaacacgttgctggtgtgccacagggtttcaccctgggttttcagcgcctccaccagcgcgggatggcaatgacccagcgccgtgaccgcaatcccgcccgcgaaatccacatactccttgccctgctgatcccagacgcggctgcctttccccttcaccgggataaattcagccggtgcataaatcggcagaatcacttcatcgaatgtcgcgcgggtaattgctggttgttcagttgccatgtcatgcccatccattttatgtcacattgattgtgaaaatataatcacaaaatatgcataaaaaatcacagcaaggcaacagatattcagcgatggaggaaatttgccagcagcgcgtgcccctgctcgctgaggatgctttccggatggaactgcacgccttcgagatcccattcgcggtgacgaatccccatgatctcctgcgtatcgctccaggcggtcacctcaaagccgtcgggcagtgtcgacgggtcaatcaccagcgaatggtagcgcgtcacggttaacggattattgagccccgtgaacactccggtgcccgtgtgggtgaccggcgaggttttaccgtgcatgactttggcggcgcgcacgatggtggcaccaaaggcctgggcaatcgcctgatggcccagacaaacgccgaggatcggcagcttgccggcatagtgctggataacctccagcgaaatacctgattccgacggcgtgcaggggccgggtgaaatcacgattttctgcggagccagcgtctcgatatcggccaggccaatctcgtcgttacgtcggacaaccacctctgcacccagttcgcaaaaatactggtaaaggttccaggtgaaggaatcgtagttatcaatcagcagaatcatggcggctcccgaaaaaaatgccgccctattctactcagattcccgcgcttcgctcactactttggcaaagatcgcgtttagcgcggttaaatcccccgttgcgccgctgcggttagcggacacccactcctcgggatcgatatcgcgccagtccagtgaatagcccgcatggagcgccagctgctcaaagaaaacgcgctgagcaataccgttaccacgcgcaaaaggatgcagcatgttgatttcacaataataatggctaattttttcaatgaacgccgctttctcaaggccagccagatacttttcgctttccagcgccgccatcagttcattacccatcttttcgatgtattcgaaatggcagaagggaatatcacctttgaaaatatcgtcggtccggaactcacctgcccgcttcatctctctgcggtagagatggcggtgaataaggcacagatggggtaacccgggcgcggaaggcccaagcgccaggctctcaatctcgggatccgatggaccattacctttctcaaggagacaactggcctgaaagttgacgctacgctgctgctcccagagacgggatttttgcttgtcggtgagttttttcacttaacgcctccctgaatagtccgtttgccacaagtataagcagcaaaacgcgctttcgcagggaggggtcacaacacgggcgagcctcgcccgcgtcgaagaacgttacggcagaacttttgcggagaggatcacgacaggtttggacggcacattctgatacggaccgacgtcatgggtaggcacctgagaaatcttatcggccacatccatccctttcacgattttaccgaacaccgcatagccgaagtcgcgctggccgtggtcgaggaaggcgttatccgccacgttgaggaagaactggctggtcgcgctatctttgtctgcggtacgcgccatagagatcgtgccgcgcttgttcagcaggccgttgtccgcttcgtttttgattggcgggttcggctgtttctgctgcatctgctcgttgaagccgccaccctgaatcatgaagcccggaatcacgcggtggaaggtggtgttgttatagaaaccactgttcacatagtcgaggaagtttttcacagaaaccggagctttctggctattcagttccagctcaatattcccggcggaggtggtcagcagaacgtgagggtccccttttgctgccagcgcagcaggggaaacggcagaaagagcaaacacagctgcgacagccgccagtgttgatttgagcatgagaattccttaacaaagcgcagtataaaaagcgaatggcttgattctaaagagcagtatgaacgtagaccagccttttacctaattttacgaaattgaaacaattattactgcgcaaacgattggttagaccgtcacttaatgtgatttagatcacattaaaacctgcaatgacataatcattacccttaaaagataggaatggatcactttagcgactaaaatctgcccgctctcagcgccccttcggcgcttttctttttttgaacaggccagacatgactaacagcaatcgcatcaagctcacatggatcagcttcttctcctacgccctgaccggcgcgttggtgatcgtcaccgggatggtgatggggaatatcgcagactacttccatctgcccgtttccagcatgagtaacaccttcaccttcctcaacgcagggatcctgatctctatcttcctgaatgcctggctgatggaaatcgtgccgctgaaaacccagcttcgcttcggcttcgtgctgatggttgccgccgtggcgggtctgatgctcagccacagcatcgccctgttctcagccgccatgttcgtgctcggcctggtcagcgggatcaccatgtcgatcgggacgttcctgattacccatatgtatgaaggccgccagcgcggcgcgcgcctgctgtttaccgactccttcttcagcatggccggaatgatcttcccgatggtcgctgccgttctgctggcgcgcagcattgagtggtactgggtctacgcctgcatcggtctggtctacgttgctatttttattctgaccttcggctgcgacttcccggttctgggtaaaaaagcgcaaaccacggcagagcctgtggcgaaagagaaatggggtatcggcgtgctgttcctctccatcgccgccctgtgctacatcctgggccagctgggctttatctcctgggtaccggaatatgccaaaggtctgggcatgagcctgaacgacgcgggtaaactggtgagcgatttctggatgtcttacatgttcggcatgtgggcgtttagcttcatcctgcgcttcttcgacctgcagcgcattctgaccgtgctggcgggcctggcgaccgtgctgatgtatctgttcatcaacggttccccggagcatatgccatggttcattctgaccctgggcttcttctccagcgcgatttacacctcgatcatcaccctgggctccctgcagaccaaagtggcctcgccgaagctggttaacttcgttctgacctgcggcaccatcggtaccatgctgaccttcgtggtgacgggcccgatcgttgcccacagcggcccgctggccgcactgcacaccgcgaacggtctgtacgccgtggtgttcatcatgtgcttcatcctgggctttgtgacccgccaccgccagcacaacgcggcagcggcatcgcactaaaccctgcgcccctttgcattacgcagaggggctgtttctggcgaaactgacctcttctcctccggtatccatctggatccaggtctgcgccagctgcgtagtggcaataatccgcccctgacgaatcgaccagcgcaccggcacctgacagcgcaccgcttcaaacccactctccgcaggcagaataatcaggtttgccggatttcccgtttcaataccgtaatcgctcaggccaaaggtgcgggcgctgttatgggtaatcaggttcaggccgctgtcgatttgcggatagcccatcatctggcagacatgtagccccatatgcagcacctgcagcatgttgccggtgccgagcgggtaccacgggtcgaagacatcgtcatgaccaaagcagacgttaatgcccgcctcctgcagctctttcacccgggtgatgccgcgacgcttcggatagtcatcaaagcgcccctgcaggtggatgttgaccagcgggttagcaacgaagttaatccccgacatcttcagcagacggaagagccgcgaggtgtaagcgccgttgtaggcgtgcatggcggtggtgtggctggccgtcacgcgcgggccgatgccggcctcatacgccagcgtggccaccgtctcgacaaaccgcgactgttcgtcgtcaatttcatcgcagtggatatccagcgggcggtcatacttcttcgccagctcaaaagcgatatgcagcgactggacgccatattcccgggtaaattcgaagtgcgggatcgcccccaccacgtcggcccccagttttaacgcctcttccagcagcgccgcgccgttcgggtaagagagaataccttcctgaggaaacgcgacgatttgcagcgttacccacggggccacctcctgcttcacctccagcatcgccttcagggcggtaagcgttgggtcagagacatccacatgggtgcggacaaactgaatgccgttagcgatttgccacttcagcgttttccaggcgcgtgctttcacgtcgtcatggctgagcagcgctttgcgctccgcccagcgttcaatgccttcgaacagcgtgccggactggttccagttcggctcacccgccgtctgggtggtatcaagatgaatatgcggctcgatgaacgggggaatagccagcccaccgcgcgcgttcagtacctcataactttcggcgtgggtgtcgtccatgggggtgatgtcaccaaatcgcccgttctcgatggcaagttgccacagcccatcccgacccggtaaacgcacattctgaacaagccataacggtgatgtagacataactttcccctcataaacgcagctgatattcaggcgtatcgatttttgcaaaaccgcccctgatttgtacacaaattcaacgaacacgaaaagcctgcgatttccgccacttataaaaatcctgacaaatcagtcatataccacctaaggagtaggcgaaggcgtatttgatttgcatcaataagcgcccctgctgaatcgttaaggtaggcaataatagaaaagaaatcgaggcaataatgagcaaagtcagactcgctatcatcggtaacggcatggtcggccaccgctttattgaggatcttctcgataaagccgatgctgagcagttcgatattaccgtgttctgtgaagaaccccgcaaggcatacgaccgtgtgcacctgtcttcctacttctcccatcataccgccgaagagctctctctggtgcgagaaggtttctacgagaagcatggcgtaaaagtgctggtgggcgaacgcgctatcaccatcaaccgtcaggaaaaagtgatccactccagcgccggccgtacggttttttacgacaagctgatcatggcgactggctcgtatccgtggatcccgccgattaaaggctcggaaacgcaggattgcttcgtttaccgtaccattgaagatctcaacgccatcgaatcctgtgcgcgtcgaagcaaacgcggtgcggttgttggcggcggcctgctgggcctggaagccgcgggcgcgctgaaaaacctcggtgttgaaacccacgtcatcgaatttgcgccgatgctgatggccgaacagctcgaccacatgggtggcgatcagctgcgccgtaagatcgaaagcatgggcgtgaaggttcacaccagcaaaaacaccaaagagatcgttcaggaagggactgaagcacgcaaaaccatgcgctttgccgacggcagcgagttggaagtggacttcatcgtcttctccaccggcatccgcccgcgcgacaagctggcaacgcagtgcggcctggccgtcgcgcagcgcggtgggatcatgattaacgacacctgccagacctccgacccggatatttacgccatcggcgaatgcgccagctggaacaaccgcgtattcggcctggtcgcgcccgggtacaaaatggcgcaggtcgccgtggatcatatcctcggcagcgaaaacgccttcaccggcgcagacatgagcgccaagctgaagctgctgggcgtggacgtaggcggtattggcgatgcgcatggtcgcacgcccggcgcgcgcagctacgtctatctcgacgaaagcaaagaggtctacaaacgtctcatcgtcagccaggacaacaaaaccctgctcggcgcggtgctggtgggcgacaccagcgacttcggtaacctgctccagctggtgctcaacgccatcgagctgccggaaaacccggacgcgctgatcctcccggcgcacgcctccagcggcaagccgtccatcggcgtggataaactgccggacagcgcgcagatttgctcttgcttcgacgtcaccaaaggcatgctgatctccgcgatcaacaaagggtgccacaccgttgcggcgctgaaagcggaaaccaaagccggtaccggctgcggcggctgtattccgctggtcactcaggtgctgaacgccgagctggcgaaacagggcatcgaagtgaacaacaacctgtgcgagcacttcgcgtattctcgccaggagctgtaccacctgatccgcgtggaaggtatcaagtccttcgacgaactgctggcgaagcacggccagggctacggctgtgaggtgtgtaaacccgccgtcggctccctgctggcctcctgctggaacgagtacgtgctcaagcccgagcatacgccgctgcaggacaccaacgacaacttcctggccaacatccagaaagacggcacctactccgtgattccacgctctgccggtggtgaaattacgccggaagggctggtcgcggtgggccgtatcgcacgtgaatttaacctctacaccaaaattaccggctcccagcgtatcggcctgtttggcgcgcagaaggacgacctgccggaaatctggcgtcagctgattgaagcgggcttcgaaaccggtcacgcctacgccaaagcgctgcgcatggcgaaaacctgcgtgggcagcacctggtgccgctacggcgtcggcgacagcgtgggcttcggcgttgagctggaaaaccgctacaaaggcatccgtaccccgcacaaaatgaagttcggcgtctccggctgtacccgcgaatgtgcggaagcgcagggtaaagacgtgggtattattgccaccgaaaaaggctggaacctgtatgtgtgcggcaacggcgggatgaaaccgcgccatgcggacctgctggcggcggatctcgatcgcgacacgctgattcagtatctcgaccgcttcatgatgttctacatccgtaccgccgataagctgacccgtaccgcctcctggctcgataacctcgagggcggcatcgactacctgaaatcggtcattatcgacgacaagctgggcctgaacgaacatctggtagcggagatggcccgcctgcgcgaggcggtgatctgcgagtggacggaaaccgtcaacaccccggcggcgcagacgcgcttcaaacactttatcaacagcacccagcgcgacccgaacgtacaggttgtgccggagcgcgaacagcatcgtccggcgacgccgtatgaacgtattccggtcacgctggtggaggaaaacgcatgagccagtgggtaaacatctgcaatattaacgacattctccccgccaccggcgtctgtgcgctgctgggcaacgagcaggtggcgattttccgccctcgccacgatgaacaggtctttgctatcagcaatatcgacccgttctttgaggccagcgtgctctcccgtggcctgattgccgagcaccagggtgaactgtgggtcgccagcccgttgaaaaagcagcgtttccgcttaaccgacggactctgcatggaagatgaaagcttctcggtcaaacactacgacgtccgcgtgaaggacggcgaggtgcagctgaaagcgtaacccctcgccttttcaataggaaaggcttatgaccccttatgggtaacggcaggaaaaaccgtatgttctgtacgattcctgctgttatcctgacgtcaattcttcccccgccatgaatgctgtgaggtaacgtcgtggatcacctgccgattttttgtcaattacgcaaccgcgactgcctgctcgtgggcggcggcgacgtggccgagcgcaaagcgcgcctgctgctagaggctggcgcccgcttgaccgtgaatgccctttccttcgccccccagtttgaggtttgggcccaggaagggatgctcacgctggaacagggtgcgtttaatgaatccctgctggacacctgctggctgaccattgccgcgacggatgacgatgaagtgaaccagcgcgtgagcgacgcctgcgaagcgcgccgtatcttctgcaacgtggtggatgcgccgaaagaggccagctttatcatgccgtcgattatcgaccgctcgccgctgatgattgcggtatcgtccgggggacgttcgccggttctcgcgcgtctgctgcgggaaaaactggaagccctgttgcctcaacaccttggccagattgcgcattatgccggtcagctgcgttcacgcgtgaagcaaaccttcgcgaccgtgggcgagcgccgtcgcttctgggaaaaattctttgtgaacgacaggctggcgcagtcgctggcgaatcaggacaccaaagccgttgaagagacgaccgagcagttgctaagcgaaccgctggaccatcgcggcgaagtggtgctggtgggcgcaggccccggagatgcgggtttgctgacgctgaaagggctacagcagatccagcaggcggatatcgtggtgtacgaccgtctggtctccgatgacatcatgaacctggtgcgccgcgacgccgaccgcgttttcgtgggcaagcgcgcgggctaccactgcgtgccgcaggaggagattaaccagatcctgctgcgcgaagcgcaaaagggaaaacgcgtggtccgcctgaaggggggcgatccgtttatctttggacgcggcggtgaagagctggaaaccctgtgcgacgcgggtattccgttctccgtggtgcccggcattacggcggcgtccggctgttcagcgtactctggcattccgctgacccaccgcgactacgctcagagcgtgcgtctggtgacgggccacctgaagaccggcagcgagctggactggcataacctggccgccgaaaagcagacgctggtgttctacatggggctaaaccaggccgccacgattcaggcgaagctgctggagcacggtatgaatgcggatatgcccgtcgcgctggtcgaaaacggcaccgccattacgcagcgcgtggtggatggcgtgctgacgcagttaggcgagttggcgcagcaggtcgaaagcccggcgctgattgtggtgggccgcgtggttgaactgcgcggcaggctgaactggttctccaatcactaacgcatattcctcctccccggagtagtccttaagcggactactcccctcttacgcctaccgataacataccgcccgcatagtggaacttttccatttattccctcgtattacatccattttttagacaaggaatgcatatgttcaaactggcaaaagccgccgttctggttggcctgttatcgacgctgacggcctgcaccggtcacgtacagaacaccaaaaataattgcagctacgattatctgctgcacccggcgatctccatttcgaaaatcatcggtggttgcggcccggcagcgcagcagtaagcgttttacaggcgtaaaaaaaccgggatgtcccggtttttttgttggcgtagagcggttttttgtcgggtggcgctgacgcttacccgacctacacggtcccgtaggccgggtaaggcggagccgccacccggcaaagcaggcttaaggtttacccacaaacccaatcgcttcatacaccgctttcagggtttcggacgcgcgcgcgctggctttttccgccccctctttcatcactttctgcaggaacgcttcgtcgttacgatagcggtgataacgctcctgcagctcggtcagcatgccggaaacggcatctgccacttcgcctttcaggtggccgtacatcttgccttcgaagtgtttttccagctcagggatgctctggccggtgacgccggagaggatatccagcaggttggagacgcccgctttgttctgcacgtcgtagcgcacgactggcggctcgtcggaatcggtcaccgcacgcttgagttttttcaccaccgatttcggatcttccagcaggccaataacgttgttgcggttatcgtcagacttggacatcttcttggtcggctccagcagcgacatcacgcgtgcgccggacttcggaataaatggctctggtactttaaacacatcgccgtagagcgcgttgaagcgctgggcgatatcgcggctcagctccaggtgctgcttctggtcttcgccgacaggaacctggttagtctggtacagcaggatgtctgccgccatcagcaccggatagtcaaacaggccggcgttgatgttttcagagtagcgcgcggatttatccttgaactgcgtcatgcggctcagctcgccgaaataggtgtagcagttcagcgcccagcccagctgcgcgtgctccggcacgtgcgactgtacgaagatggtgctcttctccggatcgatgccgcaggcaagatacagcgccagggtgtccagcgtggctttgcgcagcttctcaggatcctgacgggcggtaatcgcatggagatcgacgatgcagtaaatgcaatggtagtcatcctgcatgctgacccactgacgtaacgcgcccatgtagttaccaatggtcaattcacctgaaggctgtgcgccgctaaaaacgatgggcttagtcattgttcaattcctgatgttcactgtgcgaaagcccgagtgcgggcaacaaatctttgaagtggtcgaaaacgacgtccggctcactcagcgtgatggcttcaccgtagttgtagccataggttaaccccacggaaggacacccggccgcgcgggcagccagaatatcattgcgggaatcgccgacaaagagcagctccgcaggcgttaaggataattttcctgccaccagcagcagcggttccggatggggctttttgttttgcacgtcgtcgccgcccacaatgacggagaaatacttcgcgatattgagcgcttccagcagcggtgcgacaaacggcgtgggtttgttggtcaccagacccagcgggatgcccttcgcgtgcagcgcgctcagcgtttcctgaacgtcagggaacaggaagctgccctcctcgacggtctcttcatagaaacgatcgaacagtttgcgcagaatacgcagctgctcttcctgcgggatatccgcgtgatcgacgctcggtttaccctgggcggaacgctgcgacgcacgctcctgacgcgcccacgccaacgcgcgcgccatcagaacatcggcgccgttgccaatccacgtgacgacgcgctcttcacccgcaacggggagttcaagtgcatacagcgcctggtcgacggcgctcgttaagcccggcgcgctgtcaaccagcgtgccgtcgaggtcgaatgccacaccccgaatagcctgtaatttatccatgacttaccttcgccagctcgcggcgcatttcatcaatgacttttttataatccggttggtcgaaaatggctgaaccagcaacgaacatatccgcgcctgccgccgcaatttcaccaatgttattcactttcacgccgccgtccacttccagacgaatatcgtagcctgactcgtcaatacgacggcggacttcacgcagcttatccagcgtgtgagggatgaatgactggccgccaaagcccgggttaacggacatcagcaggatcacgtccagcttgtccatgacatagtcgagatagctcagcggcgtggccgggttaaacaccagacccgctttacagccgttctctttgatcagctgcagcgtgcgatccacatgttcagaggcttccggatggaaggtgatgatgctggcacccgccgcggcgaagtcaggcacgatgcggtcaaccggtttcaccatcaggtgaacgtcgatcggggcggtaatgccatagttacgcagcgccttgagcaccatcggaccgatggtcaggtttggaacgtagtggttatccatcacgtcgaaatggacgacatccgcgccagccgccagtgcgttggcagtgtcttcacccaggcgggcaaaatcggccgacagaattgagggagcaatcaaaaactgtttcatccgcttctccttgaaatgtgtttaccggcgggcaaaacggctcaggggcgataaagagccaggagttcgtccacctttttacgtgtgccgccgttgctgctaatgctacgccgcaccttaacctgaaaatgcttcgcggctttgtaccattcgcgcgtatcaggcgtgtcgtgattcgaaattaacaccggaattcttttgctgaccagcttttccgccatctccgccaggcgcgcctgctcggcagggctgaagctgttagtgtgataggcggtaaagttcgccgtcgcagacagcggcgcgtatggcgggtcgcagtaaaccaccgaattgacgcctgccagttccatacactcttcataggagaggcaatgaaactccgcgttctgcgctttttcagcaaagtgataaagctcgtcctgtgggaaatacgggcgcttgtagcgaccaaacggcacgttaaattccccgcgcaggttataccggcacaggccgttgtaaccatgacgattaagatagaggaacagcagggctctgcggaacggatcctgactctggttaaactccgcgcggaactggtagtaaacgtccgggttattgttctcgggcgtaaacagcttgcgcgcctctgcgacatactcatcggtacggagcttaacgatgttatagaggctgataaggtcgctgttgatatccgccaggatataacgagaaaaatcggtgttgaggaacaccgatcccgcacccacgaaaggttcgataagacactcgccttcaggcaggtgctttttaatatcatcgagcagggggtatttcccccctgcccatttcagaaaagcgcgattttttttcatgctgactaactgattacaccttctccggctgtggagaaagctccgacagcatcctgcgctttaaacattacttcagatcggcctgaacctgatgaatcggcttcgcccatgggttcttcgcctgaacgtcagctggcagcgccgctacggcacgttttgcttcatcttttgacgaataaacaccgctcaccagcacataccacggctgaccgttacgggtcgtctgataaacaacatagtttttcagatttgatttcttcgcccagctgttgaggttgtcgtagttagacgaactgctcagctgcagcgtgtagttgctggaaggcgcagacttcagcgaaccgacgttacctgccgttttacctgccgcgctgctggatgcggttgccgtcgcggctggtgccgctgtggcagccggtgccgtggtggtcgccgtggctttcggcgcagtctgcgtgacgggcgctttagcaggctcgctcaccgcagccgtttccgtgcgtttcggctgggtcggtacggctttcacttcaggcgcttttaccactgcctgaggtttggtttcacgcttaggctcaatcactgcctgcttacgctcaggacgtgttgtagtctgcgtctggtgcggtttggtttccgtcgcggccgtttgcggctgagcgttaccgccgcgaatcggggcaacggttgcaggttcagttggcagcgtagagttaaccacgacgttatcaacctgctgttggttctgcggctgcgtcagcgcattgttcaggtctccctgaacttccacacgctgctgaccttctggcgcaacaggtgcctgaccctgagctggggttgaagaaacgggcggcagagaaacatcctgcggcgctgtggtgttaccggcggtctgctctgcggaagtagcacccggcgctggctgtgcgccattcgcctgattggacgcatcgttaccggaaaggttgatgctcttctcagcggaagccgtttgctcggttgagttcgttgacggtgctttaagcgcggagccaatgccgacaatcagcagcacaagcaccagaacgccaaggcccatcataatgtactggcgggacgccggttttggcgcagcggcttttttacgtttacgcgggcgacgctctacaggctgttcgtccattgaatcttcttcggactcataatcctcttctgctcgctcttcgtgcgcgttgcggctgcgcgaagggcgacgatcgtctgcatccagatcaacatcgtcaaagttgatctgcggctcgttatcacgttctgaagattgacgagaacgaccagtacgacgatcgctgggatcgggtttcagctcgtcttctggtttgaattcatccatttaacaccccactcaaaggcttatgccaacgactttgcatttcacctgaagctaaacgaccacctgcgacagtggcctgacctttctagttgttacgcctgctgacagtcagcgatagcgccaagaacgacatcgtgcggcactccgccgcgcacttcactcttccctattgcaagcgggagtacaagacgcatctcacctgccaatacttttttatcgcgcatcatgtggggtaaatacgcttgcgccgacatctcctgcggcccgttcaccggcaaacctgcacgctcaagcagcgcaatgatacgtgccgtctcttccggtttgaactgcccaaggcgttcagaggtgcgggcagccatcaccatgccggccgcgacggcttcaccgtgcagccagttgccgtaacccatttcggcttcaatcgcgtgaccaaacgtatgcccaagattcagtaaagcacgtaagcccgtttcacgctcgtctgcggcaacaacttctgctttcagctcacagcaacgacgaatgcagtatgccagttttgcctcatcgaggcccagcagcgcatccatattctcttcaagccagttaaagaactcgccatccagaataatgccgtatttgatcacttccgccagacccgaagccagttcgcgcttcggcagggttttcagacagtcgagatccaccaccaccgatgcgggctgatagaacgcgccaatcatgtttttgccgagcggatggttcactgccgttttgccacccacagaggagtcgacctgggacagcagcgtggtagggatttgaataaagcggacaccacgctgatagcttgcggccgcaaagccggtcagatcgcccacaacaccgccgcccagggcaagcagtgttgtatcgcgaccatgcggtttttgcagcaatgcggtaaagacggtatccagtaccgtcaggcttttatactgctcgccatcggggagaatcacactgtcgacttttacgcccgcctgctcaagcaggtggcgtacgcggtcgagataaagcggagccagcgtctcgttggtgaccagcatcgcctgatcacccgctttcagtggtaaaaaggaagctgggtcgttaaacaaaccagccgcgatggtgatagggtaactacgttccccgagagtaactgtaatcctctccatgacgcgacatccacctttaatgcttttacccgcaggcgagtgtatataaagccagaatcagttgctttccagcatatgaataatctggtttgcaaccactttagcgctctggtcgtcggtacgaatggtcacatcggcaatctcttcatacagcggattgcgttcatcggccaacgcttccagaacttcgcgtggtggcgtttcaacctgcagcagcgggcgctttttatcgcgctgcgtacgtgccagctgtttctcaatggtcgtctcaagatagaccactacgccacgggcggagagacggttgcgggtttcgcgagatttcacagagccgccgcctgttgccagaacgatgccctgtttttccgtgagttcgttgatcactttttcttctcggtcacggaaaccttcttcgccttctacgtcgaaaacccagcccacatcagctccggttcgtttctcaatctcttgatcagaatcgtaaaattccatattgagttgttgagctaactgacgcccaatagtgcttttgccggcacccataggcccaaccagaaagatattgcgtttctctgccattttatcggtactactaagactattcgttaatggtaatccccgcttcgcagacacccggcgtagcaggacatgaactgaaacctcatatgcaatagagcgagagtcagactaaaaattatctcaatactccggcttgtttggcaacagattaaatcaccgcgccgggcgcataaggtaataagacgtaagtccaactcaaatcggtactccttgtatgctaattcatgccccacgtcaaacatctgcaacaaactgaatgcaaaatcattgcggggatcgttacccgtcagcgaataccgaccagacgtggtgtaataaacaccactaattcacgccgttcgttgtctttcccgtcatggcgaaaaagcgatccaatccaggggatgctcccaagccccggtactctgtcactgccggttttgttcttctgggaaaaaattccgcccaacgccagcgtttctccactttttacctccacctgggtttctatctcctgcttgtcgatagccagcgtttcgccatcggcctgctgcagaacctgtcccggcatattttcgctgatgtgtaatttcaggcgcacgcgccctcccggtaacaccaccggcgtgacctccatccctaataccgcttccttaaactcaacggaggtggcgccgctttccccgcttgagacctgatacgggatctcactgccctgcttaatgctggcaggttgcatatgcgaggccaacagccgcgggctggcgataatatcgacctgctgtttttgctccagcgctgaaagttccagatcaagcaacctgccgttaatccggccgatattaaaccccacgtggctggtggcgctggcaacggaaagatcgctgcccagcgtcgtgatctgtcccaccttgcccgcgtcggtagcgtcggcgagattccacttcacccccagctcgcgcaggcttttttcgttgatggtcacaatatgcgccgccagttcgacctgctcgacgggaatatccatctcggcggcccagcgccgcagcgtatccaccgcagcctggttatcccgaatcagcaggcggtttgtacgtttgtcgacggataagctcccctttgggctcaggagtttttccgcggctttttgcagctccccggcatccgcataagaaaagggaatgccctgagtgaccagcggggcatcaagctgtcgacgcgactgttcctgttctgaacgctcccgctgttcatgctgccaggccgcggtatgcacataaaaaataccgccctcctcgcgcaagacgagcccggcgctggagacgaccgtccgtaacgcctgcctccaggggacgcgcgtcaggttaagcgaaagcgtaccgctgacatcaggcgataccaccagattacggttctcctgtgcgaccagggcctgtaacacctggaccacaggcacgtcatccaccatcagcgtgaccggttttggcgcggcggcccacagcggttggctgaacgccagtagccacagcattatccgtaaattcatttttatccgttccttctcgttgccacgtccattttcccgggtcacaggtgtcacccacatcaactgccagctccgctgcattgacggcggttatcctccagccagccgggaagcgctcatgcattttcagccggtgccagcgcttttccccatcctgtaaaatgccgatagtctcctgcccttccaccatgccgcgaaagcgccactgcgccagctcgccaatggcgcaaggatcgtccggaggacgaaacggatcgcgcataccggtcaatagcagcactgagcaaaccagcaaacatcgcgcgctatttcgcatgttccagctccagctgcaggcgtaacgccctaccttgtggcgcaattgcgaaagcggcgatctccacatcctgctgtgccagccgggaaaaaagttccggaatggcctgccactccgcatccagcgccagctcccctccattctgcagcggcttccagtgaaccagcgtcgtctcatcgccctgaaaattgagcggggagaacggcgtcagcgcccgtgcttttacagcgtccggacgaaacggcccctttctgacggcaggccataacgccgcgttcgtcctcacatcttcaatcagctggcgttgttgttcagcacactgcctgtctaccggtctgagcaacgccccccatgcgaacagccctgccaggagactccccaggcaccagcagagtacccgatgccagggacggctttcgcaccagcgttctaacaaggtattcacgcgttacccctcgcttttgagatgaagcgtaaacatccagtgcccccggctatcctgccgaagctcgcccggcgtcccgggcgtaaagcccgctatttggccaagcgcatcgcgcagagcagagagggccggcagggtgatggcataaccggtcaaaatcaacgcaggcggctgatagcgcagctctgtcagccagacctgtgaaggaatggcgcgggaaagggaggccagcaccggttgccatgcgcgtcgttgcctggtttgcgcgggtagctgcgcctgtgcggccagtttttgccgggcgacaagcgtgtgctgcacggactgcattcccgtcagatccgtttgcagcgcgcgcagtttcacgaactggttcatccgcagacaaacaatgactacgaacatcaacagtactgtgccgatacacattgcgccccagaagcgcaggcatcgcgcgcgccgctgctgtcgccagggcagaaaattcaggatgctcatacgggcacctcgctcatggccaacgccagcgcgacggtataatcagctccgcattccggcagcggagcatggcagcgttccaggatttcccacggatcacgtcggcaatcaaacagcgcgatgtcatccggaccaagcgccagcagcgccgccagctcggccacgttttctgcttcggtagttaagcggcgtccccactggtggcgcatcgcccagagccactgccgatcgtcccgccaggcaacgcactgcgccggtgccactgcgggaagaagattcgtcagcgcgctggcatccggggtaatggtcaccagccgcaaacgcagcgttttcgccagcgccagaagggtatcgacctcgttgttttgtgcggccgtcacgtgaaaggtattgctgaaggtatcctgggcgtagtcgaaacagagggtatcggcagacatctccagttcgcgggcgagcgcgctacccagccatgagagctgctcgctgtcgcgcagcgcaacggtcgggcggggaagcgaccgctgcagagtgcgtgctgccgggaaagagaggaacacccgatgggcgtgcggcagcgtttttcgccagtcgcgcaacgcatcaaccagctgttctggctgacaaattttgccgtcacgaatgatgccttcgcccagcgggattgcccaccagcgccgcagacgccagccggacttatcccggtccagcgccacgatcagcaccctatcctgttgaatatgaacgcccgtttgccatgttttgaaggccatgcttcacgatctccttatcgcccgtcgccctgacggctatatcaatgaatcaggcttgcctttatactaccgcgcgattgtttagaaactgcccaagtgaaaccaaatgggaaatctccggtgaagttcgtaaagtatttattcatccttgcagtctgttgcattctgctgggagcaggctcgatttacggtttgtacaaatatattgagccacagctacctgatgtcgccacgcttcgcgatgtgcgtctccagatcccgatgcaggtctatagcgccgatggcgagctcatggcgcagtatggcgagaagcgtcgtatcccgctgaccttaaaccaaattccacccgtgatggtgaaagcctttatcgccacggaggacagccgtttttacgagcaccacggtgtcgatccggtggggattttccgtgccgcgagcattgcgttgttctctggtcacgcctctcagggggcgagtaccattacgcagcagctggcgcgtaacttcttcctcagccctgaaaagacgctgacccgtaagatcaaagaggtgttcctggcgatccgtattgagcagctgctgagcaaagacgagatccttgagctgtacctcaataaaatctacctgggctaccgtgcctatggcgtgggggcggccgcgcaggtgtacttcggtaagcctgttgagcagctcaccctaagcgaaatggccaccatcgccggtttgccaaaagcgccatccacatttaacccgctctactcgctcgaccgcgccaccgcgcgtcgtaacgtcgtcctgtcacgtatgctgagcgaaggctatatcagccagagcgagtatgaccaggcgcgcaacgacgtcattgacgctaactaccacgccccggagatcgccttctcagcgccttacctgaccgaaatggttcgccaggagatggtgaatcgctatggcgacaaggcctatgaagatggctatcgcgtgtacaccaccgtcacccgtaaagtgcagcaggcggcgcaggacgcggtacgcaacaacgtgatggactacgatatgcgtcacggctatcgcggcccctcaaacgtgctctggaaggtgggcgaaagcgcgtgggacagcaaaaaaatcaccagtacgctgagagcgctgcctacctacggtccgctccttcctgcggtggtgacgcaggccgatcctcaggaagccgttgcaacgctcgcggacggtacgtccgtctccctgcgcatggacggtatccgttgggcgcgtccgtaccgctcggataccctgcagggcgccacgccgcgtaaagtgaccgatgcggtacagaccgggcagcaaatctgggtgcgcaaggttagcgaatcctggtggctggcgcaggtgccggacgtcaactcggccctggtttctatcaatccgcagaacggcgctgtactggccctggtcggcgggttcgatttcaaccagagcaaatttaaccgcgccacccaggcgctgcgtcaggtcggttcgaatatcaaaccgttcctctacacggccgcgatggataagggcctgaccctcgccagcatcctaaacgacgtgccaatctcccgctgggatgcgggggcgggttccgactggcagccgaaaaactcccctgcggaatatgccggcccgattcgtcttcgtcagggtctgggacagtcgaaaaacgtggtgatggtgcgtgccatgcgcgccatgggcgtcgactatgccgcagagtatctgcagcgcttcggtttcccggcgcagaacatcgttcgcaccgagtcgctggcgttaggctcagcctcctttacgccgcttcaggtcgcgcgtggatactcggtgatggccaacggcggcttcctgattgacccgtacttcatcagcaagatcgagaacgatcagggcggcgtgctgttcgaggcgaagccgaaaattgcctgccctgactgcgatattccggtcatttatggcaatacgccgaaatctgaagtacttgaaaacaaggacatggaagaccctgccgtgtcgcaggagcagcagaacggcgtggtgccgcagccgcagctcgagcaggcgaacctggcgctggtggcgcagaccggcgcgcaggaatacgccccgcatgtgatcaacacgccgctgtctttcctgatcaaaagcgcgctgaacaccaacatcttcggtgagccaggctggcagggtaccggctggcgcgcaggacgcgatctgcagcgccatgatatcggcggtaaaacggggacaaccaacagctcgaaagacgcgtggttctccggttacggtccgggcgtggtgacctcggtctggatcggcttcgacgatcaccgccgcgatttagggcgtaccacggcctccggcgcgattaaagatcagatttccggctacgaaggcggcgcgaagagcgcgcagccagcctgggacgcctacatgaaggccgttcttgaaggcgtgccggagcagccgctgacgccaccgccaggcgtggtgacggtcaatatcgaccgcagcacgggccagctcgccaacggcggtaatagtcgcgaggagtatttcatcgagggcacacagccaaccacacaggcggtgcatgaggtgggtacagagattatcgataacggcgaaacgcacgagctgttctaaatgcaaaaatgcccggtcaaaaccgggcaacacagcgtaggccgggtcaggcgaagccgccacccggctttttttatgggctacagtcgcccctgccctttcaaccactcccgtaccaggaacagcgcgctcacgttgcgagcctcattaaagtcagggtcttccaggaggtccatcagatgcgccagcggccagcgaacctgcggcagcggctccggctcatccccttccagcgattcaggatagagatcttccgccaccacgatattcattttgctggaaaaataggacggtgccatgctcagttttttcaggaatgaaagctcattcgccccgaaccccacctcttctttcagctcgcggtttgccgcttcaaagacggtttcgcccgggtcgatcagccctttcgagaacccaagctcgtaagattccgttcccacagcgtattcgcggatcaaaatcagatgatcgtcgacaatcggcacaatcatcaccgcttcgcgcgacgaggggcgcatacgttcataaacgcgacgcacaccgttgctgaactccagatccacactttcgacattaaacaggcgcgatttggcgactgtttcaacattcagaatggtgggtttttgtagtggtttgctcatcgtgatgggtcttagcagtgagaactggcgttattgtgcgatacgccgcacggtttcggcaatgtcaatcgttctttatttacatttatgcaacgtagcagggatcaatcctcaattcaaaacaaatgtcaagaggttgaaatgtttccaggaatttgctgatatcgcgccataacaggctttgctatcatcaccggtcactgggatgcgcttcagaatgctcaagttcgactccatacttgccgatagccagccacagactctcattcaatgtaaaggtgctactgactacacctgtaagaagataagtaagatggggaaagcatgagcaccattttgattgttctcgctgctatgctggccggcgcattggttgcagggtggttgtacaggcgccgcatacagcgccgttatcgcctgccttttttaactgcatttgcgggcgcgaccacgcgtaaactcacgcaagacgagcgcgatgcggttgaaaactatctcgaaatcctaaaccgtactcagctcacgcctgggccaacgggtgccaccgctgcgcccgtggcgttaaagcttaatgcgcagagtgataccgtgctctgcgtgacgcgttccatcacgcgctacggcatcacgactgatgaccccaacaagtggcgctattaccttgattccgtcgaagtgcatctccctccgtcctgggagcaatacattaatgacgaaaacagcgttgagctgattcacaccgattcattgcctctggttatctcgcttaacggccacacgctgaatgaatatcttcaggaagccccgcgttttgcgctggagcgcgccagttcgacgcaggcttctattcgtggcgaagagacagagcagattgaactgctgaacattcgccaggagacgcatgaagagtacgccctgagccgcccggacggcattcgtgaagccctgctgatcgtcgccgccttcctgctcttttttttctgcctgctgacgccggatgtgtttgtcccctggctggcgggcggtgcggtactgctgctggcgggcgggctatgggggctctttgctccaccggccaaaacctctttgcgcgagatccactgcctgcgcgggacgccaaagcgctggggtctgttcggtgaaaacgatcaggaacacctcaacaatatctcgctcgggattattgacctgatttacccgcgccactggcaaccgtggatcgcgcaggatttaggccagaaaaccgatattgatatctaccttgaccgccacgtcgtgcgtcagggacgcttcttatccctgcatgatgaagtgaaaaatttccctcttcagcactggcttcgcagcacggtcattgccgggggcgcggcgctggtcttagtcatgctgctgcttttcgtgccgctggatatgcccatcaaattcaccctgtcgtggatcaaaggggcgcaaaccattgaagcgaccagcgtcaaaaaactggatgaagccggtgtacgcgtgggagacacgctgcgcctgaagggaaccgggatgtgtaatattcacacgccgggggcatggaacacgcgtcagaactcgccgttcatgccgttcgattgctcgcaaattatctggaacgacgcaccgccgctgccgctgccggaatccgaagtggtgaataaagccacggctcttacccagacggttaaccgccagctgcacccgaaaccggacgatgattcacgcgttagtcccgcactgcgttcggccattcaaaaatcaggcatggttctgctggatgattttggtgacatcgttctgaaaacgcaggatctctgttcttcgcaggatgagtgcatacgtcttaaaaatgccctggtcaacctcgggaacagtaaagactgggactcgctggtaaagcgcgccgaagcgggacgactggatggcgtcaacgtgctgctgcgtccggtgagtgctgaatcgctggataacctggtcgccacctccacatcaccttttatgatgcgcgaaaccacacgggcggctcaggcgctgaacagcccggcaccgggaggctttgtgattgcaagcgatgagggcagcgacctggtcgatcagccttacccgcaggttgcactttatgactacccggcgcaggagcagtggagccagttccagcgcctggcgcagatgctgatgcaaacgccgttcagcgcagaagggattgtcacgagtgtttataccgacgccaacggcacgcgccatatcggcctgcaccggatgccagatagcgcaggtttatggcgctacatcggcacctctctgctgatgaccgcgatgctgatcgccattttctggaacggctttatggccctgcgacgctaccagcgctcgcgcacccggcttgcagagatccagcaatattatgaaaattgcctcaatcctaagctgatcccctcctctgagagcctgatctgataacgtcgttgcgcgacaagatgtgctaccctgtcgcgcacgtttcttctggctggagttcccccctatgcatcttgatatcgactggcagcaggtcgacaccgttctgctggatatggacggcacgctgctcgatctcgcctttgataactatttctggcaaacgctggtgccggaaacctatggcgagcagcagggaatctccccggcagaagcgcaggcattcattcgttcgcaatatagcgccgtgcaacatacgctaaactggtactgtctgaactactggagcgagcgcctcggtctggatatttgtgccatgaccaccgcccagggaccacgcgccgtgctgcgcgaggatacggttcccttcctggacgcgctgaaagccagcggcaagcgccgtattttgctgactaacgcgcatccacataacctggccgtgaagctggagcatacgggactggcgtcgcaccttgatttattactttccacccacacatttggttatccgaaagaggatcagcggttgtggcatgcggtgaaggaagagaccggcctgcagccggagcgcacgctgttcattgacgacagcgagcccattctggattccgcggcaaggtttggcattcgctattgtctgggcgtcaccaatcctgactctggcctggctgaaaaaagctatctgcgccacccgggactgaacgactaccgccagatgatcccctcactgaccgtgaaggagaggccatgaaagaaaaaccctctgacggggtaagactggataaatggctgtgggcggcgcgtttttataaaacgcgcgctcttgcccgcgagatgattgacggcggaaaggtgcattacaacggccagcgcagcaaaccaagcaagctggttgagctgaatgccaccttaacgctgcgtcagggcaacgatgaacgtacggtagtgattaaagccattaccgaacaacgacggcccgccccggaagccgtcctgctttatgaagagacggcggaaagcattgaaaagcgcgagaagaccgcgctggcgcgcaaaatgaatgcgctgaccatgccccacccggaccggcgaccggataaaaaagagcgccgcgatctgatgaaatttaaacacggtgagagcgagtaaccctcacccgcacgagagatgaaaatggcccaacacgaccaattacaccgctatctgtttgaacaattcgccgtgcgcggcgagcttgtcaccgtatccgaaacctggaaacagattctggaaaaccacaactacccgctgccggtgaagaccctgttgggcgaactgctggttgccaccagcctgctgaccgcaacgctgaagtttgccggcgatatcaccgtgcagctgcagggtgacggcccaatgtcgctggcggtgatcaacggcaataaccagcagcagatgcgcggcgtggcgcgcgttcagggcgacgtgcctgaaaatgctgacctcaaaacgctggtaggtaatggctacctggtgatcaccatctccccggaggaaggtgaacgctatcagggcgtggtgggtctggaaggcgataccctcgcagcctgcctggaagattacttcatgcgttctgaacagctgccgacgcgtctcttcatccgcaccggtgaagtggacggccagccagctgcgggcggcatgctgctgcaggttctgcctgcgcaggacgcgcagaccaatgatttcgagcacctggcgacgctgaccgaaaccatcaaggcggaagagctgttcaacctgtcggcgaccgacgtgctgtggcgtctgtaccacgaagaagaagtgaccgtctacgacccgcagtccgtggagtttaagtgcacctgctcccgcgagcgctgcgctggcgcactgaaaaccctgccggatgaagagatcgacagcatcatggcggaagacggcgaaattgatatgcactgtgactactgcggtacgcactatgtgttcaattcgatggatatcgctgagatccgcaacaacgcctccccggcggatccgcaggttcactaaacttctttcccctcaccctcttccgtttgggaagagggctgggttgaggggtaaaaaacaccccccaagctgaatcgttttcccaatgtaactcttacgtaattttcttacgtgtatgcgattacattcacattctttccgataaaatcaccagcctttaaccttttcggaacattttccccaacaaaaaagcgattcctgcgataatccgcctgcgctgtgactggagtcgcagcgttttccgttagtaagggttttgtccagatgcgtgaatctatgagccccgtcgcggtaaacaacctcagaaaaaccctacaatttcaggcagtacatattggctaaggagcagtgatatgcgtgttactggtttaaccccgcaagatctcaaggcttatggtattcacgacgtccaggaagtcgtctacaaccccgactacgatacgctgtatcaggaagagctcaatccagcactggaaggatacgagcgcggtgtgttgacgaaccttggtgctatcgccgtcgataccggtatttttaccggtcgttcgccgaaagataagtatatcgtccgagacgaaaccacccgcgatacgctgtggtgggctgacaagggcaaagggaagaacgacaacaaaccgctctctccggaaacctggcagcacctgaaagggctcgtcacccatcaactttccggcaagcgtttgtttattgtcgacgctttctgcggcgctaacgccgacacccgtctctccgtacgttttatcaccgaagtggcctggcaggcgcatttcgtgaaaaacatgtttattcgtccaaccgacgaagagctgcaggacttcacccctgatttcatcgtgatgaacggcgcgaaatgcaccaacccacagtggaaagagcagggtctgaactccgaaaactttgttgccttcaacctgaccgagcgtatccagctgatcggcggtacctggtacggcggcgaaatgaagaaagggatgttctcggtcatgaactacctgctgccgctgcggggcatcgcctccatgcactgctcggctaacgtcggtgaaaaaggcgacgtggcggtcttcttcggcctgtccggcaccgggaaaaccaccctgtccaccgatcctaaacgtcgtctgattggtgatgacgaacacggctgggatgacgacggcgtattcaactttgaaggcggctgctacgcgaagaccattcgcctgtctgaagaggccgagccggatatcttccacgcgatccgtcgcgatgcgctgctggaaaacgtcaccgtgcgtgccgacggctccatcgacttcgacgatgcgtcgaaaacggaaaacacccgcgtctcttaccccatctaccacatcgacaacatcgtgaagccggtgtcaaaagcgggtcatgccacgaaggttattttcctgacggcggatgcgtttggcgtgctgccgccggtgtctcgcctgacggccagccagacgcagtaccacttcctctccggtttcaccgccaagctggcgggtaccgagcgcggcgtgacggagccaaccccaaccttctccgcctgtttcggcgcagccttcctgtcgctgcacccgacgcagtacgctgaagtgctggtgaaacgcatgcaggcatccggcgcgcaggcatacctggtgaacaccggctggaacggtaccggcaaacgtatctccatcaaagatacccgcgccattatcgacgccattctggatggttctctggacgacgccgaaaccttcacgctgccgatgtttgacctggcgatcccaacgtcgctgccgggtgtggatacgcatatcctcgacccgcgcaatacgtacggttcgcctgaacagtggcgcgagaaagcggaatcgctggcgaagctgtttatcgagaacttcgagaagtataccgataccccggcgggtgctgcgctggtgagcgcgggtccaaaactgtagtccatgtcgggtggcggcttcgccttacccgacctacaaaaaagggtggctcgtgccacccttttttcaactctctttcacctgcccccgcgtgaccggaaccggcaaccaggcgcgaatgctcaacccgccccgctcgctggtaccaatctccagcaacccgttatggttatccacaatacgctgtacaatcgccaggcctaagcccgtaccgctggtgctgcgtgcgctgtcgccgcgcacaaacggctggaacagatgcttacgctgctcgggcttgatgcccggaccgtcgtcttccacctggaaccaggcgcggttgagctcagacccgctgctgactttgatccagccgttaccgtagcgcgccgcgttgaccaccatgttcgctaccgcgcgcttaatggagagcgggtgcatacgaacctgaatttcaccggcctgaaggtcagtatcaatttcacgctcgtagccgctttctgccgccaccacttcacccagcaccgcgttcaggtccgccatttccatcggcatctcctggccggtgcgcaggtagtcgatgaactgctcgatgatggcgttgcactcttcgatgtccttgttgatggactcggcaaggtaaccatcctcttcccccatcatctccgtcgccagacgaatacgcgtcaggggggtgcgcaggtcatggctcacgcccgccatcagcagcgtacggtcatccgccagctgcttcacgcctgccgccatatggttaaacgcacgcgtcaccgagcggacttccgaggcgccatactcgcgcagcggaggaggaataatgcctttaccgacctgcagcgcagcgtgctccaggtcgaccagcggtcggttttgtattcggataaacagccaggctccgcctatcgccagcagcataatcgccagggtatagcggaacagcggcgagaaatcgccctgatggatttcggtcagcgggacgcgcacccagatgttgggtgacagccaggttttcagccagacgacgggcgagcttttgttgacctcaacgcgcacttccgtcgggccacccagctgttgcgccatctgctggctgaggaattcatagtgctgcgcccagcgcagacccgcgtcttccgccgcttcattcgaatagagcgagatgcccagttcacggtagatttcacgacgaaacgccgggggaacaaccagctgcgtgccgtcctccagctgcagcttatcggtcatcagcatacgcacttcgtaggccaggaccttattaaactgctggaggctcggcaggatcgcaaagttcagcaccaccaggtaggtcgtcaccaggctgacgaacagcagggtgacgatcagtaacagggtgcgggcaaacgagcttcgcggcgagaagcgcattcgcctcatgctttagagccgtccgggacgaacacgtagcccagaccccatacggtctgaatataacgaggatgcgccggatcttcttccaccatgcggcgcagacgggagatctgcacgtcgatagaacgttccattgcggagtattcgcgaccacgcgccaggttcatcagcttgtcgcgggagagcggctcacgcgggtggctaaccagcgctttcagcaccgcgaactcgccgctggtgagcggcattggctcgtcttcacggaacatttcgcgcgtgccgaggttcagcttgaacttgccgaaggcaataacggcttcttcctgcgacggtgcgccaggcagctcgttcgcctgacggcgcagcacggcgcgaatgcgcgccagcagttcacgcgggttaaacggttttggaatgtagtcgtcggcgccgatttcgaggcccacgatacggtcaacttcttcgcccttcgccgttaccataatgatcggcatcgggttgctctggctgcgcagacggcggcagatagagagcccgtcttcgcctggcagcatcaggtcgagaaccatcagatggaaagattcacgggtcaacagacgatccatttgctcagcgttcgcgacgctgcgaacctggaagccctgctcggtcagataacgctccagcagcgcacgcaggcgcatgtcgtcatccacgaccagaattttatagttttcttgcattgtgtgtactcccaaaggttcggatagtctttgtaacagcgtattctaaaaaagtgcacgtattcgaccagttaattctggtataaattctagtcgaaattgttacaaagcatatttaacagcagcttatcttttcatttcaccacataaattattattaatcctgtctgttacactgtgtggtacgtattgtgcgcaaaacagagaaccggcagcaaaggcagcaccatgaaaacgcccctgatcacccgcgaagggtacgagaagctcaaaaaagagatggatttcctctggcgcgaagagcgtcctgaggtgaccaaaaaggtgacctgggccgcgagcctgggcgatcgcagcgaaaacgctgactaccagtacaacaagaagcggctgcgcgaaattgaccgccgtgtacgctatctgacgaagtgccttgagaacctgaaaatcgtcgattactccccgcagcaggagggcaaggtcttcttcggcgcgtgggtggagattgaaaacgacgacggtgacaccctgcgttttcgcatcgtcggctacgatgaaatttttggtcgtaaggattacatctccatcgactccccgatggcccgcgcgctgctgaaaaaggaagtgggcgatctggccgtcgtgcaaaccccagccggtgaagccagctggtacgttaatgagatcgtctacgtaaaatagtccgagagcgccctccccggctggcattttgccgtgtcagcccgtataactatcccctgattttttcgactcaacagatgataaagccatgatgaaagattcgctctgccgcattattgcgggtgaacttcaggccagagccgaacaggtagaagctgccgttcgcctgcttgatgaagggaacaccgtgccgtttattgcacgctatcgtaaggaagtcaccggcggtctggatgacacgcagctgcgtaacctggagacccgtctgggttatttgcgcgaactggaagaacgtcgtcaggcgatcctcaaatccatcggcgaacagggcaagctgaccagcgaactggaaagcgccatcaatggcaccctgagcaaaaccgaactcgaagacctctatctgccgtacaagccgaagcgccgcacgcgcggacagattgcaattgaagcgggtcttgagccgctggccgacctgttgtggaacgagccgacccacgatccggataccgaagcggcgaaattcatcgacgccgacaaaggcgtagcggacaccaaagccgccctcgacggcgcacgctacattctgatggagcgcttcgctgaagatgccgccctcctcgctaaagtgcgtgattatctgtggaagaacgcccacatcgtctctaccgtcgtcgcgggtaaagaggaagaaggcgcgaaattccgcgactacttcgatcaccacgaaccgatttccaccaccccttcccaccgcgcgctggcaatgttccgcggccgcaacgaaggcgtgctgcagctctccctgaacgccgacccgcagtttgacgagccgccgaaagagagccactgcgagcagatcattatcgaccatcttggcctgcgcctgaacaacgccccggctgacagctggcgcaaaggcgtggtgagctggacctggcgcatcaaggtgctgatgcacctcgaaaccgagctgatgggcaccgtgcgcgaacgcgccgaagatgaagcgattaacgtgttcgcccgcaacctgcacgacctgctgatggccgcccctgctggcctgcgcgcgaccatgggtctcgatccgggtctgcgtaccggtgtaaaagtcgctgtcgttgacggcaccggcaagctggtcgccaccgacaccatctatccgcataccggccaggcagcgaaagcggccgtcgtggtggcggcgctgtgcgaaaaatacaacgtcgaacttgtcgccatcggcaacggtacggcgtcccgcgaaaccgaacgtttctacctcgacgtgcagaagcagttcccgaaagtgacggcgcagaaagtgatcgtcagcgaggccggggcgtccgtctattccgcgtccgagctggcggcccaggaattcccggacctggacgtttccctgcgcggtgcggtctcgatcgctcgccgcctgcaggatccgctggcggaactggtgaagatcgacccgaaatcgatcggcgtgggccagtatcagcatgacgtgagccagactcagctggcgcgcaagctggatgcggtggtggaagactgcgtaaacgccgttggcgttgacctgaacaccgcctccgtccctctgctgacccgcgtagcgggcttaacccgcatgatggcgcaaaacatcgtcgcctggcgcgatgagaacggccagttccagaaccgtcagcagctgctgaaggtaagccgtctggggccaaaagcgtttgagcagtgcgcgggcttcctgcgcatcaaccacggcgataacccgctcgatgcctccaccgttcacccggaagcgtacccggtggtggaacgcatcctggccgccacccagcaggcgctgaaggatctcatgggcgacagcagcgccctgcgcaacctgaaagccgttgatttcactgacgacaaatttggtgtgccaaccgttaccgacattattaaagagctggaaaaaccgggccgcgatccgcgtcctgagttcaaaacagcgacctttgctgacggtatcgagaccatgaacgacctgctgccagggatggtgctggaaggtgcggtgaccaacgtcaccaactttggcgcgtttgtggatatcggcgtgcatcaggatggcctggtccatatctcatcccttgccgacaagttcgttgaagacccgcacaccgtggtcaaagcgggcgacatcgtgaaggtcaaagtgctggaagtggatctgcagcgcaagcgtatcgccctgaccatgcgtctggacgagcagccgggtgacaccaacgcgcgccgcggcggcaacggcgggggccgcgagcagcagcgtccggccgcgaaagcggcaaaaccgcgtggacgtgacgcccagcctgcaggcaacagcgcgatgatggatgcgctggcggccgcgatgggtaaaaaacgctaaggttgtacatgcccggtggcgctacgcttaccgggcctacggttttgtaggccgggcaaacgcagtgccgcccggcaagcaggccgcagggaattaaaataaatagcgtgtagccatatttaaaccacgaattatcaccccgttaacaaatacctctcttttcgttttcccggcatttcagcaaatattgagcaaggtcaaacaggccgtaaattaataccgtaaacaacattccgtcacagttttaatattgctgataaaaactattctcattatcatcgcatagtagataatttaacctttcgtggaatcaggcgttatgcaattcactccagacagtgcatggaagattaccggttttacccgcgaaattagcccggcctatcggcaaaagctgctgtcgcttggcatgctgcccggctcgtcattccaggtcgtacgcgtggcgccgttaggcgatccggttcatatcgaaacccgacgcgtgaatctggtcctgcgtaaaaaagacctcgcgttaatagaagtcgaagccttatcccgataacaagccagcggtttcagtgagtccagaaaaatgaaaaagttaactattggcttaattggcaatcctaattccggcaagactacgctttttaaccagctgaccggggctcgccagcgcgtgggcaactgggcgggcgtgacggttgaacgtaaagagggccagttcacgacgacagacaaccaggtgacgctggttgaccttcccggcacctactccttaaccaccatttcgtcacaaacctcgctcgatgagcaaatcgcctgtcactacattcttggcggcgatgcggatctgctgatcaacgtggtcgatgcctcgaacctcgagcgtaacctctatctgacgctgcagctgctggagctgggtatcccctgcatcgtggcgctcaacatgctcgacatcgcagagaaacaaaagctacgcatcgacgttgatgccctctccgcgcgcctcgggtgcccggtcgttccgctggtctcgacgcgcgcgcgcggtattgatgcgctgaagctggccattgaccgtcacgcgggaaatcgcgacgttgagctggtgcattacgcccagcctctcctgcgcgaagccaacgtgctggcgcaggagatggacaaagccatgcctgcgaaacagcgcctgtggcttggcctgcagatgctggaaggggatatctacagccgcgcttatgccggtcatgcggccgataagctggacgtgacggtggcccgtcttagcgacgagctggacgacccggcgctgcacatcgccgatgcccgttaccaggctatcgcctcgatctgcgacgtggtcagtaacgcactgacggcagaacccagccgctttacggcggcggtggataagattgtgctcaaccgcttcctcggtttgcccatcttcctgctggtgatgtacgtgatgttcctgctcgccattaacatcggtggcgcgctgcagccgatttttgacgccggttccgtcgcggtcttcgtgcacggcattcagtgggtgggctacaccctgcacttcccggaatggctcaccatcttcctcgcgcaggggatcggcggcggtatcaataccgttctgccgctggtgccgcagatcggcatgatgtacctgttcctctcgttcctggaagattccggctacatggcgcgcgcggcgttcgtgatggatcgtctgatgcaggcgctgggcctgccgggcaaatccttcgtcccgctgatcgtcggcttcggctgtaacgtgccgtcggtgatgggcgcgcgcacgctggatgcaccgcgcgagcgtctgatgaccatcatgatggcgccgtttatgtcctgcggtgcccgactggcgatctttgcggtctttgcggcagccttctttggccagcagggcgcgctggcggtcttctcgctgtatgtcctgggcatcgtgatggcgatcctgaccggcttaatgctgaaacacaccatcatgcgcggtgaagcgtcgccattcgtgatggagctgccggtgtaccacgtcccccatctgaaaagcctggcgatccagacctggcagcgtctgaaaggcttcgtcctgcgcgccggtaaggtgattgtcatcgtcagcgttttcctgagcgccctgaacagctttaccctgagtggacaggcagcggataacattaacgactctgccctcgcctccgtcagccgcgtcatcacgccggtcttcaaaccgattggcgtgcatgaggataactggcaggcaaccgtcgggctgtttaccggcgcgatggcaaaagaggtggttgtcggtaccctgaatacgctctacaccgccgagaacattcaggagcaggaatttaacccggcggagtttcacctcggtgacgaactgctgggtgccgtagaggaaacctggcagagcctgaaggacaccttcagcctgagcgtgctggcgaacccgattgaggcgagcaaaggcgacggcgagatggcgaccggtgccatgggcgtgatgggcgagaagtttggcagcgcgtccgcggcctacagctacctcatcttcgttctgctctatattccatgcatctccgtgatgggggcgattgcccgcgagtccagccgcggctggatgggcttctccatcctgtggggattaaacatcgcgtattcgctggcgacgctgttttatcaaaccgttaatttcagccagcacccgcgctacagcctggtctgcattctcgcggttgtgctgtttaacgtgatcgttctcggcctgctgcggcgggcacgcagccgcgtcgacatcgacctgctggcaaaccgtaaaaccgccgcaacctgctgcaacagcccggcaggcgactgtcactaaggagcacaccccatggcatcgttgattcaggttcgtgacctgctggcactgcaggggcgaatggaggcgaaacagctgagcctcagcctgcatacgccgcagccgatgatcgacgccatgctggaaagactggaagccatggggaaagcggtgcgcattcaggaagagccggacggttgtctgtccggcagctgtaaacattgcccggaaggaaaagcctgcctcagggagtggtgggcactgcgcgaataaaggcggacagcgccgaacaaaactcgccaggatgtgaaataaatggcgcgtgtgccgctttagcaaccaccattgattggctttccggccacaggttatccagcagtggaaccaccttacgcggaaccagtccgtccagatagccatacatacgcaggtgcggaagcgccagcgacgccagcggttcacgcagatcgatcgtcttgagtatctcaagccccccgttaagcacctcaacgtcaggcatcggcagcgacagcacggtctgcttcagcgtgcgcgcgtcctgacgcgcggtttctgtacccatcgtctgcagcgcgagaaaacgctccaccgtccgctggaaatcgtcgcttagctgctgctggaaccctgccagcacttcaggcttgatccccggccacgcgtcctgtgcgctaaaacagggtgacgaggcaacggtgaccagcgcgctcacgcgcccggggttatccagcgcaatcttgcttgccaccagcccgcccaggctccagcccagccagacagcgttttgcggcgcggcgtccagaacctgctgcgccatctcatcaagcgacatcgcgccaaagccgcgactgcggccataacccggcaaatccaccagatgcagcgtaaattgcgaggcaagttcctcgcttacgcaacgccacacttcagcattcagtccccatccgtgcagcagcacaagatggcaatttcccgttccgacggtctgccaccacagcgtcttcatcagttactgttctctttttcacatggaggttgcacatgctaacagtacctgggttgtgctggctatgccgaatgccgctgacactcagcaggtggggcatctgctccgtctgtacgcgatcgctgcaatggcgtatcgggagctgtccacaatgtggtttaccggccacaaatccctctttgccctgtggccggtgcctgaaaaaatccccgccgtggagcgcgctggtggcggtggatgattatgttccgccgctgagcaggctgattcacgcgctgaagttttccggtcaaagttccctggcacagccccttgcgcgactgctactgctggcggttttgcaggcgcggcgccaccgcgcattgccgaaaatcgacaggttggtgaatgtccccctctaccgacgccgccactggcgacgcggttacaatcagagcgacctgatctgccgtcccctcgcccggtggcttggctgtcagtatgatgcccgcgcgctgacgcgtgttcatgccaccgccatccagcatcagctcagcgcccggcttcgcaaaagaaacctcaaaaatgcctttcgccttgaattgccggtcgacggtctccatatcgcgattgtggatgatgtcgtcaccacaggcagtaccgttgctgaactttcccgactgcttttgcaaagcggcgccgcgtcggttcaggtatggtgtctgtgccgtaccttgtagcccttcttcaatgggcgtatgattatacccaggtaatttagtcaactattaggccaaagctatgatccgtatttccgattctgcacaagcgcactttgccaaactgctggcaaatcaggaagaagggacgcagatccgtgtgtttgtgatcaatccaggcacgccgaatgcagaatgtggtgtttcttattgtcctccggacgccgtggaagccaccgacactgcccttaaatttgaacagctcaccgcctatgttgatgagctgagcgcaccgtatcttgaagatgcggagatcgacttcgtcaccgatcagctgggttctcagctgaccctgaaagcgccgaacgcgaaaatgcgtaaagtgtctgacgatgccccgctgatggagcgcgttgagtatctgctgcaatcccagattaacccgcagctggctggccatggcggtcgtgtttccctgatggaaatcaccgacgaaggttttgccattctgcagtttggcggcggctgtaacggctgttcaatggtcgatgtcaccctgaaagaagggatcgagaagcagctgctgaacgagttcccggaactgaaaggcgtgcgtgacctgaccgaacaccagcgcggcgagcactcttactactgattcattgcccgtctgtattgcccggtggcgctgcgcttaccgggcctacaaaaccctgctccccctcttcgctcccctctatatgttgacctgcgtctcataattcacattttgccttccagggtgattctcaatcacgccatgttacccgtatcattcccatgggcactaagcacactcataacagccgactaaacttaatcgtttaaaaggcatcagtattagtgccgttacttctctgttcccagttgggacaaccggaatttgtcgttgaaacaatgacgttacccataacaattcaaaggccaggtaaatcatgccattagtcatcgttgctatcggtgttgtgttattactgctcttgatgatccgcttcaaaatgaacggatttatcgctctggttctggtggcacttgcagtcggtctgatgcaggggatgccgctggttaaagttatcagctcgattaaagccggtgtcggcggcacgctcggcagcctggcgctgatcatgggcttcggcgccatgctcggtaaaatgctggcggactgcggtggcgcccagcgtattgccaccacgcttatcgacaaatttggtaagaagaacattcagtgggcagtggtgttaaccggctttaccgttggtttcgcgctgttctatgaagtgggcttcgtgctgatgctgccgctggtgttcaccattgcggctgccgcgagcatcccgctgctgtatgtcggtgtgccaatggccgcggcgctgtccgtgacccacggcttcctgccgccgcacccgggtccaaccgctatcgccaccatcttccacgccgacatgggtaaaaccctgctgttcggtacgattctggcgatcccaacggtgattctggcaggcccggtttatgcccgcttcctgaaaggcattgataagccgattccggaaggtctgtacagcgccaaaaccttcatcgaagaagagatgcctggctttggcgtcagcgtctggacctctctggtaccggtgatcctgatggcgatgcgcgccgtggcagagatggttctgccaaaaggtcatgcgttcctgtccgttgcagaattcctgggtgacccggtgatggcaacgctgattgccgtgctgatcgcgatgttcactttcggtctgaaccgcggccgctccatggatcagatcaacgacacgctgacctcttccatcaaaatcattgccatgatgctgctgatcatcggcggtggcggtgcgttcaaacaggttctggtcgacagcggcgtggacaaatacatcgctgccatgatgcatgaaaccaacgtgtcgccgctcctgatggcctggtctattgccgcggttctgcgtattgcgctgggttctgcgaccgttgcagcgatcaccgcaggcggcatcgttgcgccgctgattgccaccacgggcgtgagccctgagctgatggttatcgccgtcggttccggtagcgtggttttctctcacgtaaacgatccgggcttctggctgttcaaggagtacttcaacctgacgatcggtgaaaccatcaagtcctggtccgcgctggaaaccattatttcggtgtgcggtctggtcggggtgctgctgctgaatatggtggtctgatgccctaagtcggatggcggctacgccttacccgacctacatgagcaccacctgataataaaaaccccgccactggcgggttttttattacttcttaccagcagcttttcgccgcttatccaaatccttaatcagcctgttcaccccatcatcggcaaacatcgcctcaagcgtggtggacagcttgcgacgccagttcttgtactgatagctggtacccggaatgttcaccggctccgccatatcaatccagtcttccggctgcaggcccagcagggcgctgttgctgtcggcaatatagcgctgcaaaccgcggttgagtgtcgcagtcatcgccatcagcgacgctttatgcccggcgcgcttcggcagacagccatgcttatgcagcgcatccagcagtccctgtttagagagctcgcgatcctgataaagaccgcgtaacacctcttcgtcaggatacaggcccagcgttttgccaagggtcagatcgccgctttcccaatagccacgaagcgtaggaaggtcatgcgtcgtcgcgactgccattgactgttcagggtacgcttgcggcgcgcggaaggttttctcatggtcgttttcaaaatagagcactttataggagtagacgccgctgtcgcggagcttgctgacaatctccaccggcacggtaccgagatcttcaccgatcaccatgcactggtgacgcttgctttccagggccaggatcgacagcagatcgtcaaccggatactgcacgtacgccccgtgatccgccgtttcaccgtacgggatccaccacaggcgcagcacggacatcacgtggtcgatacgcagcgccccgcagttctgcatgttcgcgtgcagcaggtcgataaacggctcgtaggcgcgcgccgccatcacgtggggatccatcggcggcaagccccagttctggccgagcgggccaaggatatccggcggcgcgccgacggaggctttcagacagtaaagctcgcggtcacaccaggtttccgcaccgccttccgccacgccgacggccaggtcacgatacaggccaatcggcatcttgtagccctggctcacctgccagcaggcggcaaactggctgtacgccagccactgcagccacaggtagaagtccacctcgtcagcgtattttttgcagaaagctttcacttcaggcgtgtcgacggtctgatacgcttccggccagaccggccagccccagcgcatttcgtcctctttcacctgatacgcgtgcagcgcatcgaacgctgcctgccagtacaggctctcgccctcctgcgtcacgaactggcggaacgccgccatctcctcatcatcacgctgagaaaagcctttccacgccaggcgcagcgcggccatcttcagcgccgtcacggtggaatagtccacccagtcggcttcgcgggcctgcttcagcgcctgctgggtggtactcagtgcccaccacgcctgcgcctccgggctgtttttgaaatcatctaaggcgttaacgtcgatgtaaatcacgttcagccagcgacgggaggacgggctgtacgggctggcgctctccgggttggccggatagagcgcgtggatcgggttgaggccgataaacgcgccgccgcgctcgcccacggatgccagcatgttcttcagatcgccaaaatcgccgatgccccagttgctgtcggaacgcagcgtatagagctgcacgcaggcaccccacagctttttgccttcaagcagcgcctgcggctcgtagcagcgttttggcgcgacgatcacccggcagtggaaacgccgatcgtcctgggtgagcgtcagggtgtggtagccctccggcagcttcgccggaaggttaagggttttgccgccggtggcgtggcctttgtgctgatgcccctcttcggtggtcagcagccagctaaactcgccgcgcccctccaccgcgagcggcatctttttacctgcggtgaataccttcacattcggcaccggcgcagccgacgctttcgcgtcggttttgtgcatagcatccagcaaacgtcttttggtgtcggcgccaatagactgtggtttgccgtgagcattaatgtaactgaggctaattcccgccgcctgcgcggcactgtccagacgtttactctccatcgcgcttccttagcgttttgcctgccagatacgggcctgataatcacggattgagcggtcagagctgaacatgccgcagcgcgcggtgttcagaatgcacgcccgggtccacgcgtcctggtcgcgatacagcacgtcgacctgtttttgcgcttcaacgtaggccgtgaagtccgccatcaccagatacgggtcaccgccgtgtttgtccatgctgtgcagcatctggtcaaacgcgtgcttgtcgccgtcgctgtatttgccgctctccagctccttcagcaccgcgtccagcactttgtctttcttacgccatttcaccgggtcgtagcctttggccttgatggctttcacctcttccacggtgtggccgaagataaagatattctcttcgcccaccttctcggcgatttcgacgttcgccccgtccagcgtgccgacggtcagcgcgccgttcagcgccagcttcatgttgccggtaccggaggcttcttttcctgcggttgagatctgctcggagatatccgccgccgggatcagcatttcagccgccgagacgcagtaatccggcaggaataccaccttcagcttgtcgcccacgttcggatcgctgttgatcgcctccgccactttattgatggcgaggataatgtttttcgccaggtagtagcccggcgccgccttcgcgccgaacaggaacacgcgcggcacacggtcagcctgcgggttctcgcggatctctttgtacagcgccagaatgtgcagcaggttcaggtgctgacgtttgtactcgtgcaggcgtttgatctggatatcgaaaatcgcatttgggttgatctcaatcccggtgcgcgctttcacgaacgccgccaggcgaactttgttctccagcttaatcgcgcggtactgttcgcggaatttcgcgtcgtcagcgtatttttccaggttgatgagctggtccagatcgttcgcccactctttcttcagggtcttgtccagcaggccagccagcagcgggttgcactgcttgatccagcgacgcggcgtaatgccgttggtcacgttgtggaatttggtcggccacagctggtggtattccgggaacagatctttaaccaccagatccgagtgcagcgccgccacgccgttcaccgcaaagccgctcactacgcacatgttcgccatgcgtacctgcttatcgtgaaccaccgccagcttcgcccagaccgctttgttgcccggccaggttttatccaccagggttttaaactggtcgttaatcttgttgatgatctgcatgtggcgcggcagcagcgctttcaccagcttctcatcccagcactcgagcgcttcaggcatcagggtgtggttggtgtaggcaaaggtacggctggtgatggaccaggcgtcgtcccagctcagctgatgctcgtcaatcagcacgcgcagcagttccgggatggcaatggtcgggtgcgtgtcgttgagctgaatgacttcgaagtccggcagctgcgccagcttgcggcccgccaggtgatggcgacgcagaatgtccgccacggagcaggcgcactggaagtactgctgcatcaggcgcagctttttaccggccaggtggttgtcgttcgggtagagaactttggtcagcttctcggcgtcgatgccctgctgctcggcacgcaggaaatcgccgtcgttaaatttggtcaggttaaacggatgggcgtgcttcgcctgccacagacgcagcggctgcgccacgccgttacggtagccaagcaccggcagatcccaggcttcgccggtaatggtgaacgcaggctcccagagaccttgtttcgtcactttcccgccaatgccaacctgcacgtccagctgcgcgttatggcggaaccacgggtaggtattgcgatgccagtcgtccggcgcttccatctgatggccgtcagcgaaggactgacggaacaggccgtactggtagttcagaccgtaaccaatcgccgactggccgacggtcgccatggaatccaggaaacaggccgccagacgacccaggccaccgttgcccagcgccgggtcaatctcttcttccagcagatcggtcaggttaatgtcgtgttctttaagaacgtcaccaacctcctgataccagccgaggttcaacaggttgttgcccgtcagacggccaatcaggaactccattgaaatgtagtttacatggcgctgcccgtttgccggttttgccagaggttgagcatccagctgctctgcgagcgcaccgctcactgcctgccaccactggtgaggcgtcatctcgtttgcagcatgaaggccaaaacgctgccactgacgcgtcagggcagcctggaattgagctttgttgaaggtaggctgtgacataggggatcggcatcctttagaaagaaaacacaagttggcgctagtgtgcctggctcatttcacctcttcctcctcccgtaggggattagacagggaggagtagcggggatgagcagaaaagtgtgatcaaggccactctcagagcatagttcgagtgtgcccggaagataaaaaagtaaccgaggagaatgtcaaagaaatgaaatgcagtttcggatgaaattaaaccctgccgaaataattacttacctggaataatatttttgcaacaggatgtcatgaccaggaaaggtattattctcgctgaactttacccaccctttattaaatttgacgtcactatcccttcctgaaaccagtttcagcgcagccgcagcacaaccatacaagccagcattgacgcggcattaaagccctttccagaaagttccatcatctgcctgaatgttttgtgacagagtgcaaattcagagccaccaaatccagacataacttgcaatagttctctttctgaccgaccttatatcgtattaattacgaagcgcaaaaaaaataaaatctctcgttccccacagtgaagtgaaacctatgttgattccgtctaaattaagtcgcccggttcgtcttgaccatacagtggtccgcgagcgtctgttggctaaactttccggcgcgcataatttccgactggcgctggttacgagccctgcaggttatggaaaaacaacgctcatctcgcaatgggccgcaggtaagagcgatcttggctggtactcccttgatgagggcgataaccagcaagaacgttttgccagctatctgattgccgccatacagcaagccacccatggacactgcgtcgccagtgaggtgatggtgcaaaagcgccagtacgccagcctgtcctcccttttctctcagctgtttatcgaactggctgaatggcatcgcccgctttacgtggtgattgatgattaccatctcatcactaacccggtgattcatgaatcgatgcgtttcttcctgcgccatcagccggaaaacctgacgttagtggtgctgtcacgcaacctgccgcagttgggtattgccaacctgcgcgtgcgcgatcagcttctggaagtaggtagccaacagcttgcttttacccaccaggaagcgaaacagttcttcgactgccgcctgaactcaccgattgaggccgccgaaagcagccgtctgtgtgatgacgtcgcgggctgggcaacggcgctgcagctgattgccctctctgcccggcaaaacaacagtccggcgcaccagtcagcgcgccgtctggccggcatcaacgccagccacctctctgattacctggtggatgaggtgctggacagcgtcgatccctcgacgcgtaatttcctgctgaaaagctcgctgctgcgctccatgaacgatgcgctgatcgtgcgggtaacgggctgtgaaaacggtcagcttcagctcgaagagattgaacgtcagggccttttcctgacgcgcatggacgatcccggcgagtggtttagctatcatccgctgtttggtagcttcctgcgccagcgctgtcagtgggagctggcggttgaactgccggagatccaccgcgccgctgccgaaagctggatggcacagggcttcccgagcgaggccatccaccatgcgctggccgccggtgacgccagtatgctgcgcgatatcctcctcaatcacgcgtggggcctgtttaaccacagcgagctgaccctgctggaagagtcactcaaagccctgccgtgggaaagcctgctggagaatccgcgtctggtgctgctgcaggcctggctgatgcagagccagcatcgctacagcgaagtgaacaccctgctggcgcgcgccgagcaggagatggaaagcgagatggataccaccctgcacggcgagttcaacgcgctgcgcgctcaggtggccattaacgacggcgacccggacgaagcggaacggctggcgatggtcgcgctggatgaactgccgctggccaacttctacagccgcatcgtggcgacctccgtccacggtgaagtgctgcactgcaagggcgatctcacgcgctcgctttcactgatgcagcaaaccgaacagatggcgcgtcgtcatgatgtctggcactacgcgctgtggagcctgatccagcagagcgagattttattcgcgcaggggttcctgcaggccgcctgggaaaaccaggagaaagcgttccagctgattcgcgagcagcatctggaacagctgccgatgcacgagttcctgctgcgtattcgcgctcaattactgtgggcatggtcgcgtctggatgaagcagaaagctgcgcccgccagggtgtggatgttctttccagtttccagcctcagcagcagctgcagtgcctggcgctgctggtgcagtgctcgctggcgcgcggcgatctcgataacgcccgcaaccatcttaaccgcctggaaaacctgctcggcaacggccagtatcatagcgactgggtgtcaaacgccgacaaggtccgggtgatttactggcagatgaccggcgataaaaaatccgccgccaactggctgcgtcagacgccaaaaccggaatttgccaacaaccacttcctgcagagccagtggcgcaacattgcccgcgcgcagatcctgctcggtgaattagagcccgcagagattgtgctggaagagctgaacgaaaacgcgcgcagcctgcgcctgatgagcgacctgaaccgcaacctgctgctgcaaaaccagctctactggcaggcgggccgtaaaaacgatgcccagcgcgtgctgctggaggcgctacagctggcaaaccgcaccgggtttatcagccactttgtgattgaaggggaagtgatggcccagcagctgcgtcagcttattcagctcaacacgctgccggagctggatcagcatcgcgcccagcgcattctgcgcgagattaaccagcatcatcggcacaagttcgcgcatttcgatgagaacttcgttgaacgtctgctgaaccacccggaagtgccggagcttatccgcaccagtccgcttacccagcgcgaatggcaggttctggggctgatctattcaggctacagcaacgagcagattgccggcgagctggcggtggcggcgaccaccatcaaaacgcatatccgcaacctgtaccagaagctgggcgtggcgcatcgacaggatgcggtgcagcatgcgcagcagctgttgaagatgatggggtacggcgtttagttttgtgcagtctgatgccctctcccacagggagagggaaaacaatttgtaggtcgggtaagcgcagcgccacccgacacaaccgttagcacagttccagctgcaaattattatctttaatcacctgcatcacccccgccggcggcatcacgtcggtataaaccgcatccaccatgctaatgctgcccatgtttaccatcgcgttacggccaaacttcgagtgatccaccaccagcatcacgtggcgtgagttttcaatgatcgcgcgcttggtgcgcacctcgtgataatcaaactccagcagcgaaccgtcgctgtcgatgccgctgatgcccagaatgccgaagtcgaggcggaactgagagataaagtcgagggtcgcttcaccgataatcccgccgtcgcggctgcgtagctcgccgccagcgaggatgatgcggaaatcgtctttttgcatcagggtattggcgacgttcaggttgttggtgaccacgcgcaggttctcgtgatccagcagcgcatgggcgaccgcttccggcgtggtgccgatatcaataaacagcgtcgccccgttcgggatctgactggcgaccttgcgggcaatgcgctctttctccgccgtctgcgtcgctttacggtcgtgccaggaggtgttgaccgagctggacggcagcgccgcgccgccgtggtggcgaaggatgcggttctgatcggccaggtcgttcaggtcacgacggatggtttgtgggctgacggcaaactgctccaccagctcttcggtgctgacgtatccctgtttttttaccagttcgataatggcgtcatgacgttgtgtttgtttcatcaattatccctgagaattatgttcgttttcgcgcatggagcgtgtcggcaaaggccatcgccagccccacggccagcccggcgacgtgcgcaccgttggcgatagacataccaaacagatcaaaccatccggcaattagccatattaacgcaaaggttatcaatccgcgttgcagatagatgccgctttgcggatcgcgctccccgcgaagccagacgtagcccatcagggcatagacgacacccgacagcccgccaaaccacgggccgctgaacttgtgctgtacgtagccgctcaacagggcgctgatgatggtgataacgatcagcttgccgctgcccagacgcttttcaacggcaccgccgagataccaccaccagagcaggttgaagaggatatgcatcaccgagaagtgcatcagcgcgtggctaaagtagcgccatacgtcaaattcaagcgacggatcatagggccacgccagggcaatcatcacgctctggtcgccgaccacgttcatgataataaagacgatgatgcaggccgccatcagcagcagcgtaaacgggcccgcgcgctcgcgaagggtggcaaggaagggaaagcggctgtagtgcaatccgctgccggtctggccggactgccagcttgccgccagatagcgcgggtcgccagggttctcaagaaaacgcgccagctcctcgtttacccgcccggcctggctctcatcggccagccagacgtcggtctgcgtatgttgctgaatagtaagaataacgccctgcgtcgccatatagtcgacaaacgcctgggcgacgcgcgggttggtaaaagaggtgatcatcaacatgggcagcggtcgcttatttccacacaaaaggggacagtatagcgggatcagcgctcaaacgcgtattccacttccgccgggaaatgacgatgccaggcatcgaaaccgccgtcgacgctgtaaaccgcgtcgtaaccctgctgaagcaggtactgcgccgcgcctttgctgctgttgccgtggtagcacatgaccatcaccggcgtgtcgaagtcgttatcgcgcataaacgcgcccagcgtgtcgttggtaagatgaaacgcgcccggcgtatggcccatcgcaaaactctgcggatcgcggatgtccaccagcaccgcttttccctggtgcatcttctggtgggcttcttctacgttaatacattcaaactgatccatggtgttctctttacagtggtcaacgacaagattttaccccgtagtgtacgtcctggcggcgggtaaacgccattatgttatccatatcactctaaattgtttttttgatgttaccaaaagcgcgttcctttgctattatgagcgatatcgaacatttctgagctttaacgaaagtgcatgagggtgttatggaaaccaaagatctgattgtgataggcggtggcatcaacggtgccggtattgcggtcgatgccgcaggacgcggtttatccgtactgatgctggaagctaacgatctcgcctgcgcgacgtcgtccgccagctccaaactgattcacggtggcctgcgctacctggaacactacgaattccgcctggtcagtgaagcgctggccgaacgtgaagtgctgctgaaaatggccccgcatctggcgattccgatgcgcttccgcctgccccatcgcccgcatctgcgtccggcgtggatgatccgaattggtctgtttatgtacgatcatctgggtaaacgcaccagcctcccgggttcaaaagggttgcgttttggctcagaatcggtccttaagccagaaatcgtgcgcggattcgaatattccgactgctgggtggacgatgcccgcctggtgctggcgaacgcgcagatggttgagaagaaaggcggcgaggtgaaaacccgcacccgcgcgaccgctgcccgccgtgaaaacggcctgtggattgtcgaggcggaagatatcgataccggcgagaagttcagctggaaagcgcgcggcctggtgaacgccaccggcccgtgggtgaagcagttctttgacgacggcatgcatctgccatccccgtacggcattcgcctgatcaagggcagccacattgtggtgccgcgcgtgcatacccagaagcaggcttacatcttgcagaacgaagacaagcgcatcgtgtttgtgatcccgtggatggacgaattctcgatcatcggtaccaccgacgtggagtacaaaggcgatccgaagaacgtcgagatcgacgagagcgaagtgaactacctgcttaaagtgtataacgcgcactttaagaaacagctgtcgcgcgacgacgtggtctggacctactccggcgtgcgtccgctgtgcgatgacgagtctgattcaccgcaggccattacccgcgactatacgctcgatattcacgacgtcgacggtcaggcgccgctgctctccgtatttggcggcaagctcaccacctaccgcaagctggccgagcacgcgctggaaaaactggcgccgtactacaaaggcattggcccggcatggaccaaaggcgcggttctgcccggcggtgatatcggcgataaccgcgatgattacgccgcgaagctgcgccgtcgcttcccgttcatcactgaagggatggcgcgccactatgcccgcacctacggcagcaataccgagctgatcctgggtgatgcaaaagagattgccgatctgggcgagcatttcggtcacgagctgtacgaagccgagctgcgttatctggttgagcacgagtgggtgcgtcgtctggatgatgctatctggcgccgtaccaaagaagggatgtggctcaacgccgaacagcagtctcgcgtggcgcagtggttgctgcaacatgcggcgaaacgtgagctgtcgctggcgtcttgatgcaaaaaacgcccggtggcgctacgcttaccgggcctacgggatcaagtaggccgggtaaggcgaagccgccacccggctttgtttttacaacctcaccggatcaatatgccagatcgtctcggcatactccttgatggtcctgtctgacgagaaatagcccatattggcgatgttgtacatcgcggcgctggtccacttctcaggctggcgatacagttcgtccaccttatcctgacagtcgacgtagctgcggtaatccgccagcacctggtagtgatcgccaaagttaatcagcgaatccaccagatcgcggtagcggctcggttcatcagggctaaacacgccggttgcaatctgcgtcagcacctgacgcaactcttcatcctcttcgtaatactgacgcggcgagtagcctttcctgcgcagcgcctctacctcttccgtcgtattaccgaagataaagatattctcttcgcccacgtgctccagcatctcgacgttcgccccgtccagcgtgccgatggtcagcgcgccgttaagggcaaacttcatgttactggtgccggatgcctccgtgcccgccgtagaaatctgctcagagagatccgccgccgggatgatcagctgcgccaggctgacgctgtagttcggaatgaacaccaccttcagcttgtcgccaatatccggatcctggttaaccaccttcgccacgtcgttgatgagatgaataatatgcttcgccatgtagtaggccgacgccgccttaccggcgaagatcttcacgcgcggcacccattcggccgtcgggtcggccttaatgcggttgtaatgggtgatcacgtgcagcacgttcatcagctgacgcttgtattcgtggatgcgtttaatctgaacgtcgaacagcgctttcgggtttgccaccacgttcaggtgcatcgccagccagaccgccagacgctttttgttcagcagcttggcttcgcgcacggctttgttcaccgtcgggaaatcaatatgctgttccagctcgctcagctggctcaaatcggtacgccaggtgcggccgatattctcgtccagcacctcagagagcggctggttagccagcgccagccagcggcgcggggtgacgccgttggtcacgttgcagaaccgcgtcgggaagatcttcgcgaagtccgcaaacagcgactgcaccatcaggttcgagtggagctcggacacgccgttgaccttgtggctgatgacaaccgccagccaggccatgcgcacgcggcggccgttcgactcatcaatgatggacgcgcggctcagcaggccggtatcgtttggatactgctcctgcagcgtcttgaggaagtagtcgttaatctcaaagataatctgcagatggcgcggcaggattttgccgagcatgtccaccggccacgtctccagcgcttcgctcatcagcgtgtggttggtgtacgagaacacctggcaggtcacctcaaaggcgtcgtcccagctgaacttatgctcgtcgatcagcaggcgcatcagctccggaatggagagcaccgggtgggtgtcattaaggtggatcgcggttttctccgccaggttggcgtaggttttgtgcagctgatggtggcggctgaggatgtcctgaatggtcgccgaaacgaggaaatactcctgacgcaggcgcagctcgcggcctgagtaggtcgagtcatccgggtacagcacgcgggatacgttctcggagtggtttttatcctccaccgccgcgaagtaatcaccctggttaaatttaccgaggttaatttcgctactggcctgagcgctccacaggcgcagcgtgttggtggcatcggtgtcgtagccggggatgatctggtcgtaggccacggccaggatctcttccgtttccacccagcgggatttttttccttcctgctgaatacgcccgccaaagcgcaccttgtagcgcgtgttgtggcgcttgaactcccacgggttgccgtactccagccagtagtccggggactctttctggcgcccgtcaacgatgttctgtttgaacataccgtaatcgtagcgaataccgtagccgcggcccggcagcgccagcgtcgccagcgagtcgaggaagcaggcggcaagacgtcccagaccgccgttaccgaggcccggatcgttctcttcgtcgatcagttcttctaaatctaaccccatctcttccagtgcggttttgacgtcgtcataaataccgagcgacaacagcgcattggacagcgtgcggccaatcaaaaattccatcgacagatagtaaacctgacgcgtctcctgcgagagctgggcgcggtttgagcgcagccagcgttcaactaagcggtcgcgcaccgcaaacagggtggcgttcagccactcgtgcttgttggcaataaccggatctttcccgatggtgaacatcagcttgtaggcgatggagtgctttaacgcctcaacgctgagcgtgggtgaagagtagctaaatggagcgttcatatcagtaacttcgcctcgttacatcaagcgttgatagagatcgcggtatgactgcgccgcaacgtgccagctaaagtccatggacatcgcctggcgttggacgtagcgccacagcgatggacgggaccacaagacgaaagcacgccgaatcgcccgaagcagcgaccaggcattactgtcctcaaagacaaacccgctggcgataccgtccgccaggttttccagtgagctatccgataccgtatccgccagcccgcccgtgcggcgcaccagcggcagggtgccgtatttcaggccgtaaagctgcgtcaggccgcagggttcgaaacggctcggcaccaggatgacgtccgcgccgcccataatgcggtgcgaaaatgcctcgtggtagccaatctgtacgcccacctgccccggatgttccgcggcggcggcaaggaaaccttcctgcaataccgggtcgcccgcgccgagcagcgccagctgcccgccctgctccagtaaaccgggcagcgcctccagcaccagatccagccctttctggctggtcaggcggcttacgacggcgaacagcggcactttgtcgttaaccttcaggcccatcgcaatctgcagctggcgtttgttttccgctttgtcttccacggaatcacgaccgtagcgcgccgccagcaggagatcggtttccgggctccagatctgttcatccacgccgttcagaatgcccgacaggcggccttcgcggtggcgctgctgcagcaacccttccatgccgtagccaaatgccggctgggtgatctcacgcgcgtaggttgggctcaccgccgtgatgtgatcggcgtagtacagccccgccttcaggaacgagatctgcccgttaaactccagaccgtgcatgttaaagaacgaccatggcagatcgatgtcattcatgtgatgggcgtagtacatcccctgataggccaggttatgcacggtaaagaccgatttcgccgggtggccgcgcgcggcgagatacgccggggcaagcccggcgtgccagtcgtgcgcgtgtaccacatccggccgccagaacggatccagccccgtcgccatttctgctccaacccagccgaggagcgcaaagcgcagcacgttatcggtgtacgcgaacagattcgtatcgtgatacgggctacccgggcgatcgtataaatgcggcgcgtcgatcaggtaaatccctacgccattgtaatgtccaaacagcagggtaatgcgtccggcaaacgtttcacggcgggtcaccacttttgcatcaggtataccgcgccagatatccggaaaggcgggcagcaggactcgggtatccacgcctccggcgatttgcgccgccggtaatgcgccaagcacatctgccagaccgcccgtttttaataacgggaacatctcagaacatacgtgtaaaacctgcatcatcgctcctgtttgatttgcagcttccgcaacatttcccgtgtgactaacacgatcccctcttccgaacggtagaaacgacgcgcgtcttcttccgcattctccccaatgaccatcccttcagggatgacgcaggcacggtcgatcacgcaacgacgcagacgacacgagcgccctacccagacgtccggcaacaagactgccgaatcgatattacagaatgaatttatccgcacgcgcgggaacagcaccgactgcaccacgaccgaaccggagatgatgcacccgccggacaccagcgagttcagcgtcataccgtggctgccggagcggtcctgcacgaatttggctggcggcagcgactccatatgggtacgaatcggccagttctggtcgtacatatccagttcaggcgtgaccgatgccagatcgaggttcgctttccagtacgcttccagcgtgcccacatcgcgccagtacggttccgcattcgggtcggactgcacgcaggacagcgggaaaggatgtgcatacgccatgccagctttggtgattttcggaatgatgtctttaccgaagtcgtggcttgagttttcgtctttgtcgtcttcttccagcagctcataaagataatctgcgtcaaagacatagatccccatgctggcgagcgatttggtgtcatcgcccggcatggttggcgggttcgccggtttttcaacgaagtcgataattttgtcgtcggcatccacgtgcatgacgccaaacgccgtcgcttcagcaacgggcacaggcagacacgccacggtgcagcgcgcccctttttcgacgtggtcgatcagcatgtgggagtaatcttgcttgtaaatgtggtccccggcgaggatcacaatgtattccgcgttatagcgacgaatgatgtcgaggttctgggtgaccgcatccgctgtcccgcgataccagttctcgccgtgaacgcgctgctgcgcaggaaggagatcgacaaattcgttcatctcttcgctgaagaatgaccagccgcgctgaatatgctgcaccagggtgtgcgactgatactgcgtgatgacgccaatgcggcgaatgcccgagttcaggcagttggagagcgcaaagtcgataatacggaacttaccaccaaagtgaacggccggcttggcgcgcttgatggtcaaatctttcagacgggtaccacgcccgcccgcaagtatcagggcaaccgtttttaatggtagctggcgtgccaacattaagggatcgttcttctctaatctaaccatgactaactccttttttatcatctttggaatacgcacactccgtgcgcaggcccgtgccagacagccattactaccggattatccgctccggcaaaggggggaacggctcgccactccccgtcaggtaaaacaatctctgcgacgtcatccgtcgcgttcagcgtgaccagccatctatccgacagcaggatttgcaggcgtggtacgccgtgttgccactcttgcgcgcttaacggttgcgcgtctttattcagccagcgaacgttgccgtcaccctcttcccaccagctgttggcggtcagcgcggggatctgctggcgaagatggatcagcgcagcggtaaaatgaatcagcccgctgttggcttcaccccagtcgagccaggttaaggtgttgtcctggcaataggcgttgttgttgccgtgctggctgtgaccatgctcgtcgcctgccagcagcatcggcgtgccctgcgacagtaaaagcgttgtcagcagcgcatgaacgctggcgcgtcgccgctctatcacatccagacttccgcctaacccttctataccatgattaaagctatggttattgttagtgccatcgcgattctcttcgccgttcgcctcattgtgtttctgattgaaacaaacgcagtccctgagcgtaaaaccgtcgtgcgccgtcaacagattaacggtggccgacggacgtttgccgtcgcgcttaaagagatcgctcgacgcggcaaagcgcccggcaaattcccccagcgacaggttccgctccagccagaagcggcgcacggcgtcgcggtagtggtcgttccactcggcaaacagcggcgggaaattcccgacctgataaccgccttcaccgatgtcccacggctcggcaatgagcttcacctgcgagagtaccgggcagttttttattgcctcaaacagcggcgcctgctggctgaacgccggcgtgcgccccatcaccggcgccaggtcgaaacgaaaaccgtcgacgtggaacgtctctacccagtatttcaggcattcatacgcaaaatgcgtgaccgccggatggctgagattgagcgtgttgccgcagccggtccagttctcgtaatcgccatcctgcctgatccaataatagctacggttatcaattccgcgcatggagagcgtcgggccgtcgagatcgctttctgcgctgtggttcagcaccacgtccagaatgacctcaatgcccgccgcgtggagcgccttcaccgcatcgcggaactcgtcccgcgccttttccggatggacggcatagcgcggttcgagcgcgaacatcgccagcgggttgtagccccagtagttgcttagccccagccgctgcaggcgcggctcgctggcaaaatgggcgacggggagcagttccagagcggtgatgccgaggtgtttcaggtaggcgatcatggtgggatgcccgagcgccttgtaggtgccgcgcatctctttggggatcgacggatgcaggtaggtcagccctttgacgtgggcttcataaataaccgtattgccccacggcgtgtgcggcggggcatcgtcttcccagtcataaagatcgttcaccaccacgctttttggcgcgacgggcgcgctgtcgcggtggtcgggctcgccgtagcccacgtggaagagcgggtcatctttaaattcgccgtccacgcggtgagcgcacggatcaatcagcagcttcgccgggttgaaccagtgcccctgcgcgggatcccacggaccgtgaacgcgaaagccatagtgcataccgggccgtcctccggccaggtagccgtgccaggtatcccccgtgcgcgcgggtaaatcgtaacggtgctcgttaccttccccgtcaaacacgcacagttcaacccgctcggcgtgagcggaaaagagggtgaagttcaccccttttccgtcaaaatgcgccccgagcggttcgggtttacctgccgtaagctgcgtcattcgccctcccgcattagccagatggtgccaagcggcggcagcgtcaggctcagggagttgggtcgcccgtggctttcaatggcgtcgctctgtaccagcccaccgttaccggcgttgctgccgtggtagtgcatcgagtcggtattcagaatttcgcgccatttgcccggctggttaatgccgaagcggtaatgttcgcgcggcaccggcgtaaagttgctggcgacgatgatctcgttacccgctttgtcacgacgcacaaagacaaacaccgagcgctcgtggtcgtccaccaccagccattcaaagccgtacggatcgaagtcgagctcgtgcagcgctttgtggtggcgataggtcaggttcagatcgcgcaccagacgctgcacgccgtggtgccagttgtcgccgccttccagcagatgccagtcgaggctggcgtcgtggttccactcgcgcccctgggcgaactcattgcccatgaacagcagtttcttgcccgggaaggcaaacatccagccgtaataggcgcgcaggttggcaaacttctgccacgcgtcgcccggcatgcggtcgagaatcgattttttaccgtgtaccacttcatcgtgcgacagcggcaacatgaagttttcggtgtagttgtagagcatcccgaacgtcagcttatcgtgatgatacttacgatgaaccggatccagcttcatgtagtcgagcgtgtcgtgcatccagcccaggttccatttataccagaaccccaggccgcctgatgacggcggacgggagacgcccgcaaagtcggtcgactcttccgccatggtcacggcaccgtccacctgctcgccgataatgcggttggtattacgcaggaattcaatcgcttccaggttttcgcggccgccaaactcgttcgggatccactccccctctttgcggctgtagtcgcggtagatcattgacgccaccgcatccacgcgcagggcgtcaatgccaaaccgctcgatccagtacagggcattcccgaccaggtagtttgagacctcacggcgaccgtagttgtagatcagcgtgttccagtcctggtgatagccctcgcgcggatcgctatgctcgtacagcttcgtgccgtcaaactctgccagcgcaaaatcatccgccgggaaatggcccggcacccagtcgaggatcacgttcagcccggcggcgtgcgcggcatcaatgaaatagcggaagtcgtcgcgggtgccgaagcggcgggtcggcgcatacagcccggtgggctgatagccccagctgccgtcgaacggatgctcgttgaccggcagcagctcaaggtgggtaaagcccatccatttggcgtatggcaccagctggtcggcaagctcccggtaactcagccagaagttgttatcggtatggcggcgccaggagccgagatggacttcataaacggatattggcgcatcaaaacggttggcctgtttacgctcctccgtctggacgaccttctccggcaggccgcagatcagcgacgcggtatccgggcgcatctgcgcttcgaaggcatacgggtcggctttaatgcgcagcttgccgtgagcgtcaatcatctcgaatttataaagctgcccgtggtgcgccccggggataaacagctcccagatgccggtttcccgacgcaggcgcatcggatggcggcggccatcccagtagttgaactgtccgacaacggagacacgctgggcattgggcgcccacacggagaaccgcgtgccggtaatgccgtccatggtatcggcatgggcacccagcgtttcataagggcgaagatgcgtcccttcggagagcagccaggcatccatctctttaagcagaggaccaaagctgtagggatcgtcaatcaggttttgctgaccgtgccagagaacggcgagctgatagcgaaaaggatttttacgacggggcatcacgcccgagaagaagccacgggaatcgaggcattcaaggttaccgactttgcggccggttttgggttcaatcacccagacttctgtggcatccggcaacagggcacgaacttccagacctgcctcagtacggtgcatcccaagcacagaaaaggggtcagcgaaatgacccgcaataagcgcattaatcacgtctctatccacacgatcggacatggtattcatcctgtttttatgtcgtcctttttaagcgctccgggacgacttttaatgtgacctgaacgggacagcacaaaaatgtgcatccattctgctccgttcgaacctcaggtaagaaatgactcttccttaaagcatagccaacgctctaaatgactcctgataaaaaataagacatacgcgtgttactccatgtagtacgcaaaaaaaaggggtgaaaatcacccctggtatttaacaaattattacgccagctggcgcagcatgcggcgcagcggctcagcggcgccccacaggagctggtcaccgacggtgaacgcggagagatactccggccccatgttcagcttacgcagacggccaaccggcgtggtcagcgtgccggtcaccgcagccggggtcagctcgcgcatggtgatatcgcgatcgtttggcaccactttcgcccacgggttgtgcgcggccagcagctcttccacggtcggaatagacacatcttttttcagtttaatagtgaaagcctggctgtggcagcgcagcgcgccgatacgcacgcacagaccgtcaaccggaatggtgttcgcggtattgaggattttgttggtctcggcctggcctttccactcttcgcgggtctggccgttatccagctgcttgtcgatccacgggatcaggccgccggccagcggtacgccaaagttatccaccggcagctcgccgctgcgggtcagctcggtcactttacgctcgatatcgagaatagccgacgccgggtttgccagctcggtcgcgacgctctggtgcagctggcccatctgggtcagcagctcgcgcatgtgacgcgcgccgccgccggacgccgcctggtaggtcgccacggagacccactccaccagatcctgcgcgaacaggccgccgagggacatcagcatcaggctgacggtgcagttaccgccaacaaaggtttttacgccgttgttcaggccatcggcgatcacgccctggttaaccgggtcgagaatgatgatggcatcgtctttcatgcgcagcgacgaggccgcgtcaatccagtagccctgccagccgctttcacgcagctttggatagatttcgttggtataatcgccgccctggcaggtcacaataatgtcgagtgccttcagcgcttccagatcgtaagcatcctgcaacgtgcctgtggtaccaccaaaggacggagcagcctggccgagctgggaagtggagaagaagaccgggcggatagcgtcgaaatcgcgctcttcaaccatgcgttgcatgagtacagagccgaccataccgcgccagccgataaaaccaacgtttttcatagcatttttttcctgctgagggtgtgtgctgattgtgcaagccagtattgaactgggatatgcttcacattacaaaatgctgccaaagtcgcaagcgaaattaatcgatgattgcccggcaatcagaaatacagctaattatcataataaccttagagaaattcagggataatttacatgagtgaaatcatttccgcagcggttttattgatcctgataatggatcccctgggtaacctgccgatcttcatgtcggtgctgaagcacaccgagccgaagcgccgccgggcgatcatgatccgcgagctgctcatcgccctgctggtgatgtttatcttcctgtttgcgggtgaaaaaatcctcgccttcctgaacctgcgcgctgaaaccgtgtcgatttccggtgggattattctgttcctgattgcgattaagatgattttcccgagcgcggaaggcagcagcagcggcctgcctgcgggtgaagagccgtttattgtgccgctggcgatcccgctcgtcgcggggccaaccattctggcgacgctgatgctgctgtcgcaccagtatccgaatcagatgagccatctggtgattgccctgctgattgcctggggcgggacgtttatcatcctgctgcagtcgtccctgttcctgcgactgctgggcgaaaaaggggtaaacgcgctggaacgcctcatggggctgattctggtcatgatggcaacgcagatgttcctggacgggatccgggcgtggatgaagggatgacgttctccctctccccgtgggagagggcatcaggccgcaaaggccgtattcttgccgggtggcggcttcgccttacccggcctacaacggctctagtcccgtaggtcgggtaagcgttagcgccacccgacttttttcacagtggcaagatgccttcatttgtacgcaaccagcgcggtgctttcaacataccgctatacagcccaactaagccttgcaacaaatctccagccactctttcatcactctctgaaagtgaacgagccaacagcaactgcgttaatagcgggcaatagcttcccaactgatcaacttccggttcgaaggcagggacgtccagaggcaggccatctaccgttaaactcgcttttaaatattcaggaacaggttcaagcatgggtgcggcctgataccctcaacctccccccaaataagtgagggctaccccttacgaatcaaataccggtacggcagcgtctccgtctgctgtgccaccagctcatgctccataaaggtacaaaaaccgggaatgtcgcgcgtggtggcagggtcgtcggcaacgatcagcagcgtttcaccggtctgcatgttgcgcacggttttacgtaccatcattaccggttccgggcagcgaaggccctgggcatcaagagtgtggtctgggctggaaaacaggtcggtcatgatcttctcggtcaggtaaaaacggctgtagtttacgccccgttgcggtcaatgcaaaccaggttaacgattgcgtaaaaactaaccattgcaatgtcccgccaaagcagtatcatgctgcggtttttattgggttccctcaccccaacgtataaaaaggtcacaatatgacgcagttttctgaatcacagcgcgtaaaagcgttgttctggctttcgcttttccatttgctggtgatcacctccagcaactatctggtgcagctccctatctccatctttggttttcataccacctggggcgcgttcagctttccgtttattttcctcgccaccgatctgaccgtgcgtatttttggcgcaccgctggctcgccgcattatttttgcggtcatgctcccggcgctgttcatctcgtacggggtttcgtccctgttttatatgggaagctggcagggctttgaggcgttaacccacttcaacctgtttgtcgcccgtatcgccgcagcaagctttatggcctacgcgctggggcagattctggacgtgcacgtgtttaaccgcctgcgtcagaatcatcgctggtggatggcacccaccgcctccacgctgttcggtaacgtgagcgatacgctggccttcttcttcatcgccttctggcgtagcccggatgcgttcatggccgaacactggatggaaatcgcgctggtggactactgcttcaaggtgctcatcagcattgtgttcttcctgcccatgtacggcgtgctgctgaatatgctgctgaaaaggctggcagataaatctgaaatcacggcattgcaggctggttaagggttcgctttatcagttgtgataagatgagcgaatgagccgttatggccgtttatcgaaaggaagaagtcaatgcgcaatctggttaaatatgtcgggattggcctgctggttgtgggtcttgcagcctgtgataacagcgacacgaaaacgcctgctcagggcgcatccgcagaaagcaatgcgaccggccagccggtgaatctgatggatggcaaactcagcttctctctgccagccgatatgactgaccagagcggcaagctgggcactcaggcgaataacatgcacgtttactccgacgcaaccgggcagaaagcggtcattgtgattgtgggcgacgacaccagcgaagatctggcggtcctgtccaaacgtctggaagatcagcagcgcggccgcgacccgcagctgcaggtcgtgaccaataaatccatcgagctgaaaggccataagctgcagcagctggacagcatcatctctgcgaaaggccagaccgcgtactcctctgtcgtgctgggcaaggtcgataacaaactgctgaccctgcagatcaccctgccagcggaagatcagcagaaagcgcagacggctgctgaaaacatcattaacaccatcgtaatccagtaacgtttcacgatgatgatgtggcctccggtgcctgcaccgggggccatttttttagccgccacgtcagcagcaatgccatcatgaccagacccgccgcggcaagatagatcaccggtacccccgcccaggccattaccagccctgccagcggcccggtaatgcccaacgacatatccataaataccgtataggtcgccagcgccgccccctggttctgctgcggtaccgcttttaccgcgaccacgcccagtgccgggaagaccagtgaaaaaccggctcccgcgagaaatacgcccattttcgccatccacggtgcgctggctacgccggtcaacagcagcccgacaatctctaccgcaaagcagatcgtcgccacgttcagcccgcccagacggttgatgccgttagggaaaagcaggcgcgcaccaacaaacgcacagctgaacagggttaacgcaaaggccgcgccgtcccagcctttggcgtcatagaacagggtaatgaaggtggcgatgaccccgaagccggtggtcgccagcgccagcgccatcccgtatggccagacccgcccgagcaccgcccggaacggcagcggtttgcccttgctggccttcactgtcgggcgctgcagcgcaaacagtatcgccacaagcgcgaccgccataatggtgacggccaggccatacagcccaccaaaggcatagcaggccacgccaagcggcgcgccgagcgccatcgcgccgtaggtgacaatcccgttccaggagatcacccgaccaatgtgtggcgtaccgacaccccccacgccccagagcgtcgagccggttcccgccaggctttgcccgataccgaggatgacgcggcccaggcagagcagcgccaggctgaccagcggccagtggctggctgaggcagccagcaggtagctcagaccactgaggaagcagccgcacaatcccaccaccacgatgctttttggaccgaacgtgtccgcgtagcgcccggcatgcgggcggctcaggagcgtggcgaaatactgcaggctaatcaccagccccgcccagaaggcactgaagcccatcacgtcatggacatagcccggcagaaccgccagcggcaggccgatggtgagatagctggcaaagttaaaaatcacaacggaaacgatgcgcagattgaggcgcagtccgctcagtgccggttcagcggcaggttcgggcatggggttctacctggattttttacaacagtgtttcactattaccacgccccaataagaaaatcagcagcgactttcagattaacggtgccagacgaagcgaggcccgggcactacacttaccgggtcatcacattaaggaacgcgcatgatcgctaacccgtccgacaaagcaggactccacatcttattaaagctcgcctgtctggtggttatccttgcgggtatccatgcggccgccgacatcatagttcagctcctgctggcgctcttttttgccattgtgcttaatcctttggtcacctggtttctgcgccggggcgttagccgcccggtagccatcactatcgtcgtcatcgtgatgctgattgccctgacggcgctcttcggcgtgctggcggcctcgctgagtgaattctccaccatgctgccgcagtacaacaaagagctgacgcgtaagatcgtcgcgctgcaggagatggtgcccttccttaatctgcatatctcacccgaacggatgctgcgcaggatggactccgagaaggtcatgacctacgccaccaccttgatgacggggctttccggcgcgatggccagcattctgctgctggtcatgacggtggtgtttatgctgtttgaagtccgccacgtcccctataagctgcgctttgcactgaataacccacaaattcacattgctggcttacaccgggcgctgaagggcgtctctaaatatctggcgctgaaaacgctgctgagcgtctggaccgggatcatcgtctggctggggctgatgctgatgaacgtgcagttcgcgctgatgtggggcgtgctggcgtttctgctgaactacgtgcccaacattggcgcggtgctttccgccgtgccgccgatgattcaggcgtttctgtttaacggtttctacgaatgtatgctggtcggcgcgttatttctcgtcgtgcatatggtgctgggcaatattctcgaaccacgcatgatggggcaccggctcggcatgtcgacgctggtcgtctttttatctttactggtttggggatggctgctgggcccggtcggtatgctgctctcggtccccctgaccagcgtgtgtaagatctggatggagaccaccaaaggcggcagcaagctggccattttgctcgggccgggaaggccgaaaagccggttgcctgggtagctgacctacctgtataggtaggtttaaaccgtcaataatccgccttaaattaccgcgttcataacctgtcgcggtatttttatttgcgttaaggaaatattaattctgtttttgtttacgtcggtcgcattacgttgaaacgcaaatcatgatttaacgcaaattaaaaaaaatgaaattgttaattattttccatgttattatgcccgccttcgcgtcaatgtaatgcaaaccttaatattgattaaaaaaacatctggcacaaaagaaacgccggatgaatattatttgtaaaaaccactacctttaattgttattattgatatggagttgttgatgaaaaagatcgttaaatggtgtgctgccgccgtattcgttggcgcactggcaggctgtgcgcgtactgccccaatcgctcaggttcactctactgtgagcgcgggtcataccgccgaccaggtaaaaacagcgattttgaaagcaggacaaaaacgtgactggatcatgacggaagccggtccgggcgttatcaaaggtcgtctgcaggcgcgcgaccactcggtcgacgttcgtattccttattccgcaacaagctattccattaactacgaaagcagtatgaacctgaaagcggctgacggtaaaattcacaaaaattataaccgttgggtgaataacctcgaccacgatattcagctgaacctctccgcgggcgccgcactgtaatatttttctaaagtcgggccgcatatggcccgataacccctatttcttgccctgaaaggttacgcagcaatgtacgaaaaggatacgctcagcgcactggatgccattaccgaagcgcaacgcatcgcttttgctccgatgttatttcagaccgcgctttgtctgcgtaactcaggcattctcgcctggctcgataaacaaggtaaagagggtgccagcctcgaggaaataaccgaacacagcacgctcggcagctatggcgtcagcgtactgctggatatgggattaagcgggcggatcgttacccaacagcatggacgttattttctggcgaaagtgggccactttttactgcacgatgaaatgacccgcgtaaatatggatttcactcaggacgtttgttacaaagggctatttcacctggcggacgccctgaaggaagaaaaacctgcgggcttagcggtgtttggcaactggccaaccatctatccggcattatcccaattaccggcacaggcgaaagagagctggttcgcctttgatcattactattccgacgccgcgtttgacgccgctttgccatatatattcgcaagctcgccgacaaaattgtacgatgtgggcggaaatacggatctcggcctacggggtaacgttgtaggcccggtaagcgcagcgccaccgggcaaaacgcattaagcctgctgcttcttatcgtgctggcggttaacccaggtattgataatcagcgtcacgatcagaatgccaaacaccacgccgagcgaaatggcgatcgggatatggtagaaatcgacgatcagcatcttgataccgataaacaccaggatcaccgacaggccgtacttcagcatggagaagcgctccgccgcgcccgccagcaggaagtacatcgcgcgcaggccgaggatggcgaacaggttagaggtcagaacgatgaacgggtcggtggtcaccgcgaaaatggccggaatgctgtccacggcgaaaatcacgtcgctcagctcaaccagaatcagcaccagcagcagcggggtggcaaacagcaggccgttcttgcgcacgaagaagtgctcgctctcgatcttgtcggtcatgcgcagatggccgcggatccacttcaccagcgggcgatcgccaatcgcggagccgtcctctttcgccagcgccattttgaccccggtgaacagcaggaacgcgccgaagacgtacagcagccactcgaactgggtaatcagccagctgccagcgaagatcatgatggtacgcaggataattgcacccagcacgccgtacaccagcacgcgacgctgcagagccgcaggcacggcgaagtagctgaacagcatcagccagacgaagacgttatcaaccgccagggctttttcaatcagatagccggtgaggaaggcgagcgcctgaggatcggccaccgcgcggccttcggtcgaggccagataccaccagaaggcggcgcagaagagcagggagagagtaacccagaccagcgaccaggcggcggcctgtttcatggtcatgccgtgcgcgccgcgacggccctgcaaaaagaggtcgatcgccagcatgatgagcacgacaaccgcgaatccgccccacaacattggagtgccgacagaatgcatactattttccttacacataaaaaacaaaaacggccatggtcagaagacgatagccgttagctttttatgcatagacctcgccttccggcaaggtctcacttacaaccacgagggttgcccggcgaccggatgcggtattgcacgcatcgtaatgacgatccaccggcgaagaagttactcccctttgcaggtaacaaaatatgtcagaccatcggtttcgtcaatggcctgcgccgtttcattacacagctttacgcgataacttccgcgctcacgccgtctgccgggaacaccacgccggtctgacggcggatctccgtttgcagcttcgccgtggtgcggctcaccgcaaggcctgggtgattcacttcgttgtcttccaccagacgggcgaagacctctgcctcatagagcatagtgttaatatgctgaggctgcgtcagctcctgcgctttgccgccgcgcgggacaaagctcaccttctggcactcggagatcttctcgataaccagcgagcccgcttcgccctgaatttcgctcggcaggacagaatcgctcaccttggagtgctgcagcgtcacgctgaaatcaccgtaatccagcaccgcgacaccgtgcgcatccacgccgctctccagcaggctggcggtggccgtgacgccgtgcggctcgccccacagggccacggcagaggccaggcagtagaaaccgatatccataatcgagccgttcgagaaggccgggttaaaggtgttcgggttctcgccatcgagatagcgctggtagcgcgacgagtactggcagtagttgataaacgctttgcgcactttgcccaccttcggcagggactgctgcagcagcaggaagttcggcaggctggcggttttgaacgcttcgaacagcaccacctggttttcgcgggcaagcgcgatggccgcttccacttcttcgatgttcgacgccagcggcttctcgcaaatcacatgctttttatggctgaggaacagcttcgtttgcgggaagtgcagggcgttcgggctggcgatatagaccgcgtcaatggcgtcgctttgcgccatgtcatcaagcgaggtgaatagatgctcgacgaggtaatcgttggcaaaactctgcgcctgctcaaggctgcgggaatagactgcggtaagtttcagtttgccggtttcgtgggcggcgtcgacgaactggcgcgtgatccagttcgttccaatgactgcgaaacgtatcataaacgtttacgtactccgtagcggggaacctttagccactgtagcacgtcatcatgacaattcgcgtgcgctattccgcattaccttttaacgataaatgcgtaagccacagccgggtatcaaactccagctggtggtactgcggctccatatggcagcacagagaatagaacgctttgtcgtgctctttctctttcaggtgtgcgagctcgtgcaccacaatcatccgcagaaaggcttccggcgcgttgcgaaaaaccgtcgcgacgcggatctccgccttggccttcagcttgccgccctgcacgcgggaaacggcggtgtgcaggccgagcgcgtttttcagcacgtggatcttgttgtcgtacatcaccttgttgatcggcggcgcgctcttcagataccggtttttcagatcctgcgtatactgccagagggctttatcggtcgcgaaatcgtgggtgccggggtagcgtttttccagcaccgcgccgagcttctgctcggcaatcaggctgcgaacctgagaaagtaaatgctccgggtagccctggagataagtaagttggttcatcaacgccccaaatcgacaataaaacgggtatactcacgcacccttttcagggatacgccaaattttaccattcaggagggccgatgagccacttagacaacggtttccgttcactcaaccttaaacgtttcccggaaacggacgacgttaacccgcttcaggcgtgggaagcggcggatgaatatctgctgcagcagttggatgagactgaaatccgcggcccggttttgatcctgaatgacgccttcggcgcgctgggctgcgccctggcggagcacacgccgtacagcatcggcgattcctacttaagcgagctggcgacgcgtgaaaacctgcgccataacgacatcgacgaatccagcgtgaagttcctcgacagcaccgcggactacccgcaggcgccgggcgtggtgctcatcaaagtgccaaaaaccatggcgctgctggagcaacagctgcgcgcgctgcgtaaggtcgtcacgccagaaacccgcatcatcgcgggtgccaaagcgcgtgatattcacacttcgacgctggagctgtttgagaaggtccttggcccaaccaccacaacgctggcctggaaaaaagcgcgcctgatcaactgtacgttcgccgcacccgagctggccgacgcgccggacacgctgagctggaaactggaagggaccgactggaccatccacaaccatgcgaacgtcttctcccgtaccggtctggatatcggggcgcgtttctttatggaacacctgccggaaaatctggaaggggaaattgtcgatctgggctgcggcaacggcgtgattggcctgacgctgctggcgaagaacccggaggccagcgtggtgttcagcgacgaatcgccgatggcggtggcctccagccgtctgaacgtggaaaccaatatgccggacgcgctggaccgctgcgagtttatgatcaacaacgcgctgtcgggggtagagccgttccgcttcaacgccgtgttctgtaacccgccgttccaccagaagcacgctctgacggataacgtcgcgtgggagatgttccaccacgcgcgccgctgcctgaagattaacggcgagctgtatatcgtggcgaaccgccacctggactacttccacaagctgaagaagattttcggtaactgcgtgaccattgcgacgaacaataagtttgtggtgcttaagtcggtgaagctgggacgtcgtcggtaagattgttttgcccggtggcgcttcgcttaccgggcctacaatggcctcggacccgtaggccgggcaagcgcagcgccgcccggcaatgttctagatcatcagagctaacttcgttccctgcgcaatcgcgcgccgcgcatccagctccatcgccacgtcgcacccgccaatcagatacaccgttttaccggcctcgcgcagcggatccgccagatcgcgctttggctcctgcccggcacataaaatcacatgatccacgcgcagcagctgcggctcgccgccgatcgtgacgtgcagcccgtcgtcgtcgatcttctggtagctcaccgccgggatcatcttcaccccgcgcgagagcagggtggcacggtggatccagccggtggttttccccagcccttcgcccggtttgctggctttacgctgcagcatcacgatctggcgcgggcttttcggcagctgtggcccttcgggtcgcaggccgccggactggctgaggctggtgtcgataccccattccacgcagaattcggcaatgttctggctggtggcttcgcccggctggcttaaatacatcgcggtgtcaaaaccgatcccgccgcagccgataatcgccaccttctcgccaaccggcgctttgtcacgcagcacgtcgagatagctcagcacttttggatgatcgataccctcgatcgcaggcgtgcgcggtacgatcccgctcgccaggatcacctcatcaaaatcagtcagatccgccgcgtggacaaactggttaagccgcagctcgacgcccgtcagctcgatcatccggcggtagtagcgcagcgtttcatagaactcctctttgccggggatctgtttggcgatattaaactgcccgccaatctctcccaacgcatcaaacagcgtcacgccgtgcccgcgcgaggcggcattgaccgcaaacgccaggcctgccgggccagcacccacgacggccaggcgttttttattgaccgccggaacgatcggcattttggtttcatggcaggcgcgcgggttgacgaggcaggaggtgaccttcccgacgaagatctgatccagacaggcctgattacagccgatgcaggtattgatctcatccgcacggccgctttgcgctttggacagcagttcagcatcggccaggaacgggcgcgccatcgagaccatgtcggcatcgccgcgcgaaatcacatcgtccgccacctgcggatcgttaatgcggttggtggtgaccagcggaacggacactttgcctttcagcctgcgcgttacccagctgaacgccgcgcgcggcaccggcgtggcgatggtcgggatgcgcgcctcgtgccagccaatcccggtattgataatcgtggcgcccgcggcttctatcgcctgcgccagctgcacggtttcgtcaaacgtgccgccgccctccaccagatcgagcatcgacaggcggaagatgataataaaatccgcgcccgcgcgttcacgtaccgcgcgcaccacctccacggcaaagcgcatgcggcgggcatagtcgccgccccattcgtcgtcgcggtggttagtgcgggcggcgaggaactcgttgatcagatagccttcagaccccatcacctcgacgccgtcatagcccgcttcacgcgccagcgcggcgcagcgggcgaagtcgtcaatcagcgccaggatctcgtcgtggctcagagcatgcggagtgaagcggttaatcggcgcctgaatggccgatggcgcaaccagattcggctggtagctgtagcgtccggtgtgcagaatttgcagggcaattttacctccctcgttgtgtaccgcgtcggtcacaatgcggtgatgcggcagctgtgctgcatcgttcaggaccgcaccgccctccatgccgacgccggaaggggaaggggccacgccgccggtgactatcagcgccaccccatggcgcgcgcgttcggcatagaaggctgccagacgttcggccccgtccggatgctcctcgagcccggtgtgcatcgagcccatcaacacgcggtttttgagtgtggtgaaccccagatcgagaggggcgaataacgacgggtagcggctcatagtctcttccagtgtaaaattaatgttatgtggtcggatgagttactaatttagccagcggcagcggaaaggtaaaagcgggatcgaatgattgtgatagatctcaaagaacttccccggtggcgctgcgcttaccgggtctacaaaaccccaggacagataagcgtagcgccatccggcgttatttacggcgctgctgcccgcaccagccccggcgcctgccacatcgacgtggtcaacccgctgtccaccagcccgagctggtccgcgtataccgcctgccatttctgcatcatgccgtcgtacagctcgcggtgcgccgggtttggcgtgaactcgtggctccatttcaccagccgctcgcccgtcgaggccatatcggcaaacagccccgcgcccgtacccgcggcaatcgcgcagcccagcgccgtggcttctttcacttccggcacgcgcaccggcaggcccgtgacgtcgcttaagatctggctccacagggcaccttttgacccgccgcccgcaaacaccaggctctcaaacgtcacgccggaaaagcgtgaaatctgcgccaggttgcaggccgaaacaatcgccgcgttctcttccagggcgcggaacagcgtcgctttattgcatttttccgggtcaatggagaggttaataaacgacggcgcggcgtggtaccactgcttgaaatgcatcgcgtcggagaagatcggcattaccccgtgggagcccgccggcacccggctggccatctcttccagcagggaataggtgtccatccccatccgctcggcaatcagcttttcctccgcgcagaaggcgtcgcggaaccaacgcatggtcagcccggtaaagaagctgatcgactccgcctgcaccatgccggggatgacgtgcgggttcacgcggatgttcatttcaggatcggtgcgtacctgcggcaggttgaccacctgctgccagaaggtgccgcccagcaccgcagtctgcccggcgcgtaccacgcccagccccagacagcccagctgcacgtcaccgccgcccatcaccaccggggtcccttcgcgcagtccgctctgctgcgcggcttcatgggtgatggcccccagcacggtgccggtctctttcaccggcgagaggatatcggcccgcagcccggccatgtccagcagcgccggacgccagtcgcgggagaagagatccagcatgccggtggtacccgcgttggaggggtcaacggccagttcgccggagagtttcgccgccagccagtcgctgatcatggtgatggttgcggccttgcggtagatgtccggacgatggtgcgccagccacagcaggcgcggcatcgcgctcagcgccagcgtttgccctgagacgtcatacacttcggattcaaaacggtcatcgtggatctctttgagttcggccacctcgcggctggcgcgggcgtcgacgttggcgcaggcccagatggcctcgccgctgcggtcgtacagcacgatcccttcgcgcatcgaacagcaggcgacggactgaatatctgccgcgctcaggcgcgcacgctccagcgcctgatgaatgcaccggcaggccagctgccagttggtgtcgaggtcgaactccatcgagcccggcacgttctccacgctcaggtgcttccactcggcctggccgacggcaatctggttgccctgcaaatcgaaaatcacggcgcgaacgctgccggtccctgcatctaacgctaaaaggtaactcatgagcttgcctcgctgttagcgcagggcgggctcttatttggccagagccagcaccgcgcgggctgtcgtctcttccgtcaccaggccattgatacggcgacccttcagtgcggcataaatcgcatcggctttctcttccccgccggccacgccaacgatggtgggcagctgcgccagctcatcaagcgagacgccgagtaattctttgtggatctccagctcctcaacgcactccccttcggcattgaggaaatagccgagaatgtcgccgaccgcgcctttgcgggcgtacatcagctgctcgccttcgctgatgtagccggagcgcaggatcgtggcgtcacggcgctggtttactgaaccaataccaactaccgccacgtcggctgcggtggcggcgaggatcacgtcccgcacgctggtctcgcgttttaagatcccggccacttcggcggaagacacgcgaagcggggcggggatcatgctgacgctgcaggccgcgtccagctggccgataccggtcatgtacggcccgacgcctccggagagcgtcacgaggcggatctgctgcgagctgataaagccgctcaggtgctgcaggctgctcatggtggtttcaccgaaccccaccgccagcagctggccgggttccagcacgcccatcagcgactgcgccgcgccaatgcctaaccgcacgttcatcggcggcgtatttagggcaggcatcacgcgcaccagcttcaggccaaagcgctgctgtagctcggtttccagcgacaggcagccctcgtagcgggagttaatctgcacgcggatcaccccggactggcggcctttctccagcaggcgggagatttttaatcgcggcagcccgagccgctcgccgatatcgttctgggtcagcccgtcgtggtagtagcaccaggccacgcgcgccaccagctcctcttccgccagcgccagcccggcaaaccgtccttcttccgcagtgcgtttatcgctcatagttgaactcttataaaaatttagatcatatgttcgtgatggcgcggagggaaagtgtgagccacgcgacaaaacggatcatttcgatcgtttctggtttatctgaatctcaatcgataaaactgtgatccctgcacggttgtaaatatagttcaccgtctacgcttttgaacattattaaatctaaaaatcatttgttcaatagcggagcgatgatgatcccacttctcgacgcgcgaagtatcagcaagcagttctcaggcgtgccggttctaaaaggcattgatttcacgctgcttgcgggccaggtgcacgcgctgatgggcgggaacggcgcgggaaaatcgacgctgatgaagatcatcgccggagtcgagacgccggatgagggtgaactttccgtcgaggggcagtcatatgcgcggctgacgcccgtgcaggcgcacaggctcggcatttacctcgtgccgcaggagccgctgctgttccccaacctgacggtgcgggaaaacatcctgttccgcctgccgcgcgaacgcgatcggggcaagcggctggcggagaaacttgagcagctgcagtgccggctgaacctcgacgccgccgccagcaccctggaagtggcggatcagcagatggtggagattctgcgcggattaatgcgcaacgcccggatcctgatcctcgacgagcccacggcctccctcacgccgggtgaaaccgaacggctgtttcgtcagatccgcgccctgcaggcgctcggcgtcgggatcgtgtttatctcgcataagctgccggaaattcgcatgctgtcgagccacgtctcggtgatgcgcgacggcgcggtggtgctcagcggtgaaaccgcgcagttcgacgataacgccctgatcgccgccatgacgccggtaagccgcgagaaatccctcagcgatacgcaaaagctgtggctggcgctgccgggcaatcgtcgcacccagccgcaggactttccggtgctgcgggtggaggatcttaccggggaggggtttatcgatctcagccttgagatctacgccggggagatcgtcggcctggccgggttggtaggctccgggcgcaccgagtttgccgaaacgctctatggcctgcggcctgtgcgcggggggcgcgtctggctggagaaccaggacatcaccgccgcaccggtaagttcacgtctggacaaaggcctggtctacctgccggaagacaggcaggtgtccggcctgttcctcgacgcgccgatccgctggaacaccgtggcgctgaacgagccgtcgctctggcagcagcggaaaagagagtccgcggtggtggagcgctatcaccgggcgctggggatcaagctcaaccatgcggatcaaaccgtgcgcacgctctccggcggcaaccagcagaaggtgctgctggcacgctgtctggaggccaacccgttactgctgatcgtcgatgaaccgacgcgcggcgtggacgtctcggcgcgcgccgatatctaccagcttattaaaagcgtggcggcgcagaacgtggcggtgctgatgatctcaagcgatctcgatgagtttcccggccttgccgatcgcgtgctggtgatgcatcagggcgtactcagcggcgaactgccgcgccatgcggtcagcctcgatcgcatgatggcgctggcgtttggagggcaatcatgaagatcttactgaaaaaccgcgagctgagcgcgtttctcgccattctggcgctgttcgccgtgctggtggcgctcaatccgtcgtacctgagtttgcagacgctggggatgatcttcgccagctcgcagatcctgatcctgctggcgatcggcgcggcgctggtgatgctgacccgcaatatcgacgtctccgtggggtcgaccgtcgggctgtccgccatcgccgtcggcgtggcgctgaacagtggctacagcctgcccgtttccattctcttcgcgctgtcagttggcgcgctggcgggggcattcaacggttttctggtggtgggattacgcatcccggcgattgtcgccaccctcggcacgctggggctgtaccgtggagcgatgctgctctggacgggcggaaagtggattgaagggctgccgccggggttgaaatcgctctctgagcctgcggccatcggcgtgtcgccccttggcatggtggtgttgattatcgtggtcaccggcgcgtggacgctgtcgcgcaccgcgttcgggcgtgatttctacgcggtgggggataacctcgctgccgcgcgccagctgggcgtggcggtgaatcgcacccgcatgatcgcctttaccctcaacggcatgctggcggcctgcgccgggattgtctttgccgcacagattggcttcgtgcccaatcagaccggcagcgggctggagatgaaggccatcgccgcctgcgtactggggggcatttcactgctgggcggcacgggcacgctgatcggcgcgctgctcggtgcgttcttcctcacccaaatcgacaccgtgctggtgctgttcaggcttccggcctggtggaacgactttatcgccgggctggtgctgctgggcgtgctggtgctcgacgggcgtctgcgtcaggcgctggcgcggcatcagcgggtgctgaagtacggtcgcttccagccgggtaacaaagggggaaagcacgtcaccccctttcccaaacgtaaaaaagaggtggcgtaaatgaggcttaactgggaaagcgcgctgctcattttgctggtgctggagatcctgctctttggcgccatcaacccgcgcatgctcgacgtcaacatgctgctgttcagcaccagcgacttcatctgcatcggtatcgtggcgctgccgctgacgctggtgatcattagcggcgggatcgacatctccctcggctcgaccatcggcctgtgcgcgattgcgctgggggtgatgatgcaggcggggtggccgatggcggtcgcgattccgctgacgctgctgctgggactgctgtgcgggctggtaaacgcggcgctgatccactacaccggcatcagcccgctggtgatcaccctcggcacgctctacctctacggcggcggcgcgctgctgctctccggcatggcgggcgcgacgggctacgagggcatcggcggcttcccggacagcttcacggcgttcgctaacctcacggtgttgggtctgccgatcccattggtcttgttcgcggtaatcaccgtcttcttctggctcattacccaccgcgggcgctttggccgccatctgtttttaatcggccagaatccgcgcgcggcgcgctatgcggcgctgccggtgaacggcatgccctacgtgctgtacggcctggtgggcgtggcctcggcgattgccgcgctggtgatggtctcctatttcggctccgcgcgttcggatctggggcgcgatcttttaatgcctgcgctcaccgccgccgtgctcggcggagccaatatctacggcgggtcaggttcggttgtcggtacggcgctggcggcgctgctggtggggtacctgcaacagggtttacagatggtcggcatccccaaccaggtgtcgagcgcgctgtcgggggcgctgctggttgtggtggtgatggggcgttcgctgagtctgcaccgcgaatgggtgcgatctctctttagaaaactatccggagcgtaagatgaaaacaaaactgctcgtcctggcaatggccctcagcttcgcttcggcgcaggcggcggaccgcattgcctttatcccgaagctggtgggcgtcggcttcttcaccagcggcggcaacggtgcgaaagaggcggggaaagatcttggcgtggacgtgacctacgacggcccgaccgagccgagcgtctccggccaggtgcagctcatcaataacttcgtcaaccagggctataacgccattatcgtctccgccgtgtcgccggatgggctgtgtccggcgctgaagcgcgcgatgcagcgcggcgtcaaggtcctgacctgggattccgacaccaaaccggagtgccgcagcatctacatcaatcaggggacgccggaacagctgggcggcctgctggtggagatggcgggcaagcaggtcaccaaaccgaacgcgaaagtggcgttcttctactccagcccgaccgttaccgatcagaaccagtgggtgaaagaggcgaaggccaaaatcgagaaagaccatccccagtggcagatcgtgaccacccagtttggctataacgacgccaccaaatcgttgcagaccgccgaagggatcttaaaagcctatccggatctggatgcggtcatcgccccggacgccaacgcgcttcctgctgccgcgcaggcggcagaaaacctgaagcgggaaggggtggcgattgtcgggttcagcacgccgaacgtgatgcgcccgtacgttgagcgcggcacggtgaaggccttcggcctgtgggacgtggtgcaacagggcaaaattgcggtcaatgtcgccgatcgtttgctgaaaaaaggcgatcttaacgttggcgacagcgtggacgtaaaagatatcggggcgctgaaggtcgagccgaacagcgtgcagggctaccagtatgaggcgaagggcaacggcatcgtgctgctgccggaacgcgtggtgttcaccaaagagaacatcagcaaatacgatttctgacgggggagcaaatggctgatttagacgacatcaaagacggcaaggattttggcatcggcacgccgcagcaaaatgtgccttacaacctgaagggctgcggctcgctggactggggcatgcagtcgcggctggcgcgcatcttcaatccgcagagcaaccgtacggtgatgctggcctttgaccacggctactttcaggggccgactaccggccttgagcgtatcgatctctctatcgcgccgctgtttggtgaaaccgacgtgctgatgtgtacccgcggcatcctcaggagccaggtgcccgccgcgacgaacaaaccggtggtgctgcgcgcctccggcggtaactcgattttgggcgaactttccaacgagtgcgtggcggtggcgatggaagacgccctgcgcctgaacgtctgcgcggtggcggcgcaggtgtacatcggaagcgagtttgagcatcagtcgatcaacaacatcatcaagcttgtcgatgcaggggcgcgctacggcatgccgacgctggcggtaacgggcgtggggaaagagatggcgcgtgacgctcggtatttctcgctggcaagccgcattgccgccgaaatgggggcgcagttcgtcaaaacctactacgtggatcagggttttgaaaaagtgaccgccagctgcccggtgccgatcgttatcgcggggggcaaaaagctgccggagcacgaggcgctggagatgtgctggcgcgcgatagaccagggcgcgtccggcgtggacatggggcgcaacatcttccagtccagcgcgccgctcgccatgctgaaggcggtgaagaaagtggtgcacgatagctggaatgcccgtgatgcgttccagttctggcaggaagagaagcagggagaagcaaaatgaacgtgacgctggtagagatcaacattaagcccgagcgggtggacgagtttctggaggtgtttcgcgccaaccacgagggcgcaatccaggagccggggaacctgcgttttgacgtattgcaggacccgagggtgaaaacccggttctttatctacgaagcctataaagacgaagaggcggtgctggcgcataagcaaaccccgcactatctcgcgtgcgtggataagctggatgagctgatgtcggagccgcgcaaaaaacgcagctttgtcgggttattgccggagtaatggtcttgcccggtggcgctgcgcttaccgggcttttggggaaaaggtggaatggttttgtaggccggatgagcgtagtccgcccggctttagattttgctttactgcgcttttttggctgcgtcctgcatctctttcattttttgcgaggccgcttgctggctttggcgtaggttttcgctcgcggcaaccagaaactcaggatgattagccaggtagatagatatcgcttcacccattttttccggatgggcggtaaagtaatcctcggcgattttgccgatttccgtcttctgctcagcggtaaactcagcggcctggctcagcgccggtgcggtcagtgtgacgaaaacggtcagaacgaggagggggtgctttatgaaaaacatgatgggtactcatttcagattaaggatgttaaccacgggcggcataacccggccatagtcgtttatggtttgccagcgtatttcgcagcgaggcgccttctggcactcgtccattgttcgctggctaaaaggggcaatgatgcccgcgttatcaatggatttgttgttaatacgcgtctggaagagcgtcacgtagtagggggtcgggttcttcaccacgagctggtttgctgaatatgaccagaggatttcccgatacgcgttttctggattgccgtttaatccctcagggcgatagaacactttgaagctcgaacgtacggccatttgcacgttgtcgctgctggtcttactggctggaatggttgagatgctgagggtgaaaagcgtttcacggtcagcaggcaacccctcatcggcacgaaaaatcctgatgctattttcgcgtccgccctgtagtgcaaaaagcgcgggcgttgcaacaagcgccgaggtcgcctgggggacagaggttgcccctggccagtttccgccagcataaatttttgcgctgaccagccagggaagcgtggatttattgcgcactgaaacggtaatggagtgctgtttttcaggatagacgaagcgtgtcccccctatcacgacgcctgcatgcgcaaaagagatgaacgttaagagtgctaaaacagggatcaggatgcgcagtttcatcacggtgttatcaggcataagtcaaaataaaggttgctgcagcattggctgttccaggcgatacagcgcctccgtcagcaagataacgggcataaaaatcaagggtggcagtaagctggttatttgacagcgtaaacagctggctttcatcgcccagcggtataagcgttttgtccggattataaataccgatagccacgccgctggcataacccggaccgcctgtcagcgaaagcaaatctgcattgccctgattgggtgtgccttcaaaatgggtactgatgttattcaaccctgcgccgcagttttcaagattgatagcaaaatgttcccatggcgtattatttttctggtttgtaaattgccctgtggcgacgtcgctcatacgaacgataagattttccgaatcaggcgatatgatgcaggttttgctttttacggtgcctacaatataaacggtcccgtcgtgcgccattgtactcgcactgcccaggtgcatcaggataatgcagaagaaaaataaccggagaaacggtttcattcatattccttactgataaagcaggtcaaaatacataacggcagtcgcatttcctgacgtcacgacgggcagcgtggatttatagtgcaaataaaacgtgagcgtgttatctcccggcagcagcggataaagcgaggactctgtattattgatcggtattggggtgcgattggaatccagtagctcaacgccgaggcccgttgccatcctgccaggcgttccctttccgttatctgaaagtgccagcaatgtcgggttgttcgcatccacattcccggtaaaccaaactttggtgccggtaatggcgcgggtgcaacctttcaacgtgatatcaaactttgtatccggcgttgtggtgccaaccgacgggaaatcatctgcggtaaagtcaccgagttcgaccgtctgctcaacgctgcctgtgtcgacgttgcaggactcccccacgatggtgccgataaactgaacattgaaactgtcattatctgctcgggctgtctgtaaggacaacgccagatttgccagcagaaacaggagaaaatagcgctttttcatcacccaatccttatgcgaaatcaacgcgtaacaaggccagagcggtgaacacgcccagttccggggaattgcccgttgtgctgataggatatgctttcagcgtcacgttggccttgcccgcctcatcagtcgtaaaaggtgcgctacttgaaaagacattcggtttcagtatgttgtcttgctcactggtaaccacgacggcaacatcaggattatccgatgccagcgcttccgggtagcgagggtccgatgtgcccataacgcgcaaggttaattgtgctggcgagttcacgtcagcattacattcaatgggcacattgaaggttttgggttgagcgttgtccggcatctgcccggcgcgcgtaaaatcaccgtgataaagagaacccagatccaccgtcacggtttgcccggcattaatgacgcagttttgcggcacggtaataacgccactgtaggtaatctggtagacaatattggtcaggcgatcgttattcgtcgtggtgacgtacacattgaacatcaattttggcgggataaccacggtgccgataaaaggcctgacaatttgtaatttaaagatcaggtcattatcgttgaccgggaaaacgccgccggtatccacttcatcgtggccgcccatgtgaacgtactcaatggggggataaaactcaccaatggttgcgtcatttattttcatggcgccaataatataatccgggtcaagctggagatatttccattcaccatccgttttgacgaccggaaaagggctcaaataggagcgataggtgcgtttttcccactcacccggtggacaggtggcgttaacctgcacatcctgatttttttccagctctgtggagccacctttaatgttctgattggtgttcagcgtggtggtcaaatcatagttaacaatcgagatgccaccgttagcatttttacaaatatcggctattccataaggtgagaatgccagcccgaccacataaaataaaatcatccataatttcatttatatacactccgttttcaaccgcagcagcggctgtttactttcaggtaattgatacttcacgctacattgcttgtctgatccttcaccccactgaattttcagcgttcccgccgggctcaggccagagagatagacctctccgtcttcacccacaatcgtatcgctgctattgtcatcacgtgacaccatggcaccgaaaggaacgggtttgccccgatgggttaaggtcattaacgcacgcgtaccaggccgggctttgaaggttgcccgcacaaccgcgccacgggttgggaccacattggttacggcatcatcgatatccatatcgtcagccagtgagttgatgtccagtgccatgcggttgagatgatacgaggacgcgtagggaaccacggcatagcctctccagtcggtatgaatacccggctcgttttcgaccttgacgttactcgcgcccggagcggcaatcagcacgttggtatcacccagtggctggctaagggtgatgccattccggtgagcaatgacgccgccgctcaaaccgtagttcacctgctggtagtcgccgtttccgctgtagttatagcccacgttcgcattgccataggcgctatcgtattcaaggctgctggagccttgtgattttgtcccctggcttgaatagccttcctgaacgctgtagctcaggttgttatcctcaagcaatgtgccgttgatcccggcattttgcgaggtttcaccctttttgtcggtgctgatgttgtaggtggcataagcgtagttatgcttctggctgacatcgttttgtggacgcagccacaggctcaatggcagcgacaaattcagcgcgtaaatctcgtcgcttttcgacatgcccggtgatttgttgtagttgtaggacagactgtaggacacatctttaatggtcccgctaaagcctacctggagtagcgtatttttttcatcggtatgccagtaggtctgttggctgcccgtgacaaagagcgaaccagcatgaccaagctgctgagagatgttgaactgaacctttcctcgcttggtgtagtacagattgtaataatccatccagggattttgctgttcggtatcgttgtcctcgtggtcacctgtgtagccgcgcatttgcttataggctgtttcatccagggaatagaatcccgatgtcgagtaacggtagcccagcagctgaaagttagtgccgaggccgttaagggattttgcatacagaaaacggatcgattgccctgaatgcgtgctgtcatccgccagcgtgctcttcgcgtgagtcacatccgcagagatagcgcccagttcacccatattcaggccggtgccgaatgccagcgagtggtaattgttagttatctgcgatccgctatacagcgtgaagccatgcgaaagcccccagattagagacccctgaacgaaattaacctcatcctgttgatcgctgctgctgcggtattcggccgctgttaatgcgtactttacgcggccttcacgctggagtacgggaacggtggaataaggcacggaatagctgttgatgctaccgtcagattcttttacctcaacactgaggtcaccgcttgaggacgtgggaaacaggtcgctaatcgcaaatgcacccggtggaacatagctttgataaatggtgtagccattttgcttaatggttacctgagcattgctttttgcgataccacggatcgtgggcgcgaaacccttcaggctatcgggcagcatattgtcatcagaggcgatttgcgcaccgcgaaaagggaggctgtcaaatacgtctgatggggtgtagctgtcacccagcgtcagtcttcctttcagcggaatgaccgcgcgttcaacataggtattaatgtgctgccagttgtcgctgcgtgagtcatcgctgttgtgataattccagcttgagtaatcccttaaccgccacgggccaaggttcaacccgctgttaagcccgaggaaatagcttttactggttgagttgctctccccccgatcgcggctacgagagccggtgaagttataattcagcaggagggcattaatgccttcatcccattgttcaggcggaatatatccgcgtgcgctattcctcagggcggcttgcgggatactgatatccagccgctgatgctcaaaatcaaaggtggttgatgaggcgggaatgattgacgaaatatcaatacagctgtccgttttttccgccgtcagcgcaggaaacgcctgaaggttaacgcccaggttttccagcgcttttgctgataaacaggcggtcagaccggtatcatccgcctgcggttgtgccgtcgacgccgtatttcttgccgtaaaggtgatatcgcgagtcgccacaaacgccccgttaagccagagatcgacacgataaacgcctggtgcttggccattggtggaaaaccgcgacaggtcagcaacggcagagggatcgctagacaaaaatgccgggttgaaaaaatattctgcacttgcatctgatggcgatagcaatcctgctatcgccatcgccactggcgtaagggatgttaaagaaaatgtgctaaaaatcagtgaagtattacgtttcatctcttttccctgcagtaaatgctaagtacttccttccttgaagacaaaatgcaggtctgctatttcatttcaggttgttaatgggaacaaatctgcgtaggggtatttgcgccgaaatcattcactgtctggaatttcacactgccggaaccgccgccggggatatccaccgtcagcgtgtttttaggtgcgaccattgaattgggaagacgggctcccccaacaaagaactgcaccaacgatacgtaatacggtgatggattcgttatgatgacttttccattttctgtccgacacgtcagcgttttgggcgcatccacggaaagggatgttaatttcttagggcgaatgaataacttaatcacactctgtgttgctatttgcagcgtattgccctgaagcttatttttatcgacagacggaatagccttgctgttcagatagaaaacagtttcgcgatcggcaggaaggtcggggccgatatacataatacgcagcgtgttctctttcttggggtggataacaaacaacggtggcgtaaggataaagtctggtgacttgataccctcaacgttggctacccatgattgtattaagaacgtattgtctgccgacgaattgatcaccggtaatgaaacctgtttatccccctgcggataaatgacgcgggtagcccctaaagcaattccacctgcagaggcattcgttgccagacccattgtcagcagcaacgtaccagccatcatcaggcgagacaaagacgtaggtgatgtgttcatttgcattgttccctcaattctcatgacgaggcactcgggcctctgagtgttttactggtagacgacgttaaaccatacctgggcgtcggccgtaccagcctgaacgtgcggttgtgtggagcggtatttcgccataaaacgcagaacattggcgccgttctgcaagggggcgtaccagggcggggctgtatccggaataagtagatggccggttgcgtcaaatattcccacaccaatcccctgcgctgcgcctgcgccataacctgcgcgaaaaatttgcgggtcttttgcatcggactcgccgctgaacagtacgcccgcacgttgactgacgctggtatcgcagtcttctagcgttatctgaaaggctgttggtgctgcccaatcgcccgttgcggcaaattcgttattgcgtatttggcccatacgcacaatctggtcctgactttctgcaccgacggaacagccggtgttgacgacttgcccctgaaaatgcacgcttccgtcgtcaattgccgaggcgggcagtgcaacgcacagcaatacgctgaaaaacagcactgattgcctggtgacctgtcgcatagtgactccgtttcgatggatcggcaaaacacccccgaatcagattccgagggtgttactgcagctaacgaatcaggagtaaaccatctggaatgttgcagtcgaggatacgttacccggcgtggccgcaccggtagcgatgtagtcaacgctcagcgggatggtgttctcgccattgatcagcttcacgttggaggaggtatcaccgatattgagtacgttaccatccggtccgaacagttgcagtgcgacgttagttgctgagccagcgcccgctgtgttagccagtgaacctgccagtgctgcgtcttgctgaccgttgaaaatcacagcggcgttctggcttaccgtggtgtcacaatcttccagaacgattttgaaatcttctttctggttcgcctgcattccttttgtcgtcaatttcacagtacgaacctggctcagcgttacagtctgatctacggagtcagctgcgaccgaacatgcagcattaacaacctggccaacgaagttaaccgtaccgccagaaaccgtgacggtgtctgcctgtgcgttcatcgctacgccacttaccattgccgttgcaatgaccattgctaaaacgtgctttttcatacaaatccttttaaataaacatctttctgtcaaattgaaattgagtaaaagctatatgctttcacagcgtgaacttgaataacgtttaacaagttccgttatttagaatatgcatttcgcataatggacgggcttattgaaaagctcttttcatcatgtttatgatgttccgcggcaggtattctaggagtcgtgaaatattatttcaatgtatggtggtataatatgccgttagttttttttaggtgtaatattagaattaattaatatttttaaatgatgtaagtagtggtgtttttaccggattttaacaatgggcggcctgtttgcggtaaaatagataaaggtggtgtatgaatatcggtttggttgcaaaaaaaatcatgtaagagaaaaggaactttataattttaaaagtataaatgtatgtctgaaatataatactattatttcaatttgtaatatttataccagaaaaatgaaatccccctcggttaagaggggggattgatcagatctcttctacgcgcactctgagtgctgccagcgctttacgtgccgcttttagcacctgctcacactgctcaatggtcagcgtaagcggcggttcaatacgaatggtttttgcgttattaagcgttccggccaccagcactcgctgcctgaacatctcgctcgcgaagctgtagccgatttcgttatcaacgaactcaatcgccatcagcatccctttgccgcgcgcttcctgcacaaggtcagggtattcccggcccagctggcggaagccgtccagcagcatgtcgcctttttgctccgcctgcgcaggcaggttttgctccagcagcacgttgatggtcgccagcgccgccgcacaggccagcgggttaccgccaaaggtggtggtatgcaggaacggattgtcgaacagcaccgagaagacttcttcggtggcgaccgtcgcgccaatcggcatcacgccgccgccgagcgctttcgccaggcacagaatgtccggctgcacgttttcgtgctcgcaggcgaacatcttgccggtacgccccatgccggtctggacttcgtcgaggatcagcagcgcgccaaactcgtcgcacagctgacgcacggcaggcagatagccctgcggagggaggatgacgccgccttcaccctgaatgggctccaggatcaccgccgccacgtcatcgccggttttacggcattcactcagcacggtgcgcatggcgttaatgtcgccgaacggcacgtggcggaagcccggcagcagcggcataaacggtttacggaaagtggatttcgcggtcgccgacagtgcgccgagggatttaccgtggaacgcgccgctggtggcgataaaggtgaatttcccgcgcggcgactggtacgctttggcgagcttaatcgccgcttcgaccgattctgtgccgctgttgctgaagaagctgtatttcagtttgccgggcgttaaggccgccagcgttttcgcgagcatggcgcgaagcgggtcgagcagttcctggctatggagaggttgtttcgcaagttgattctgtacggcggaaaccacaactggattacggtgccccacgttgaaaattccaaaacctcccaggcaatcgataaactcctgtccctgggtgtcgacaagcgtgttgagacttcccgcttgccactctacggctccgtaatccccgccggcggtaacagatttgcgatactccagaaaccctggattgacgtgctctttaaagtaatcgatgacctcacggttaagttgtttcatctcctcatgatcaagcgttcgcttctcaatgagattcagtgcgtgcgcggtacaggcaagagccgaggcgctggaaggtaacctgttcaaaatgtgctcccggggatcgcgtatcacatgatactggtttaagtattgcagggattacgccacttcagaggccttaatgaaaatcgggataaacgccaggttaaaataatgttgcacaatatttaatcatgccgatagaagccaaacgggatttagcggtacggggcagcaagtataaagaaaggggggaagagcatcgctgcactaaagaggtgcatacgctgcaacttaagcgggcattaacaggtcatactttgtcggtaatttctctacgaaagtatttgaaatcaatgaattaaaatatcgtacaaaaagtatggtttaagtcaaatctgcgatcttcatcaagtttaacaactaaagataaattgtttaccgccgaaaaaacattgacccacaaaattaacattcaaataacctgcaagggatgctcacgatgtcctctccaacctatgtcacccagaatgaatatcctctggacgatgacaccaccttaatgtctaccacagacgtccacagctacatcacccacgccaacgacacctttgttcaggtgagcggctatcagctcgatgagctgacgggccagccgcacaatatggtgcgccatcccgatatgccaaaagctgcgtttgccgatatgtggtacacgctgcagcagggcgagccgtggagcgggattgtcaaaaaccggcgcaaaaacggtgaccactactgggtgcgtgctaacgcggtgccgatggtgcgtcgcgggcaggtgacgggctatatgtcgattcgcaccagagccacagcggaagagatcgccgccgtggagccgctctaccgggcgctgaacgacgggcgctgtaaaaaacgtattcacaaagggctggtggtgggaaagggctggctgggtaaactcccggccatgccgctgcgctggcgcgtgcgcagcgtgatggcggtgctctttgccggactcgccgccacgctggccgccacctccgcaggctggttaccgcttgccgccgctgcggtggtgatgctgatgggaacgctgctgtttgagcaacagattgtccgcccgatagagaatgtggcgcgacaggcactgaaggtcgccaccggcgagcgcaacagcgtgcagcatcttaaccgcagcgatgagctgggcctgacgctgcgcgcggtaggacagcttggcctgatgtgccgctggttgatcaatgacgtgtcgagccaggtggtgagcgtccgtgacgggagcgacaggctggcgcagggaaatgaagatctgaacgatcggacccgtcagaccgtggcgaacgtgcagcagaccgtcgcgacaatgaaccagatggccgcgtccgtgcagagtaactccgaaaccgccgccgaggtggacaaactctccgtggccgccagcagcgcggcgacgaaagggggcaacgcgatgcaaaccgtcgttaaaacgatggatgacattgccgacagcacgcagcgcattggctcgatcacctctctgattaacgatatcgcgttccagaccaatattctggcgctgaacgcggcagttgaagcggcaagggcaggggagcagggtaaagggtttgccgtggtcgcgggcgaagtccgtcatctcgccagccgcagcgccagtgccgctaacgatattcgtaaactcattgatgccagtgccagcaaggtgcagtccggttctgagcaggttcatgccgcgggccgtacgatggatgatatcgttgtgcaggtgaaaaacgtgacccagcttatcgcccagatcagccacgcgacctccgagcaggcaaccggcttatcagagctaacccgcgcggtagctgaactcgacagcatcacgcagaaaaacgccgatctggtcgaggagagcgcgcacatttcgtccatggtgaagcaccgcgccggacgccttaaggatgcggtgaccgtgctccattgagtcagtcatgttccaaaaaagccgtttataccgtagggaataaacggctttttatttttctgattgtgactattaatggggtttgttgttaatttaatattaaataactaaagaaagtgtctcagttatttattcctgcctaagtcagttcttcagaatgctatttcgaaaataccccgtttggcggtctggtaacgatcgatgaggccatattaatagcctgcgcctatgtattgtgaggattatgaaataaaaaaacgatcaaactcataaagttagcgaaatcgttaccgataacagcgatcgtctgagaaataatcacatcgatggagaaaatatgttctttcatgacgtaaagatcggcacgaaattatttctggcgtttgggttctttattgtcctgatggcgatcagcgcgagcctgtctctgctgagtctgaaccgggctaataacgggatgcagtccattgttacccatgactatccgaccacggtaaaagcgaaccagttaattgataacttccaggaatttattagcactcaacagctgatgctgctggacgagcagggtacttacacggagcaatctcagcagcgcctgaaagagatcagcgagcatatcacggtgatcctgggcgagctgaacaacgccttgcaggatcaacagtctcagcaggtgctggcggatatccgcagcgtgcgccagcagtacctggattcacgctaccgcattctgcaggcggtgcagaacaacaaccgtgcgggcgccatacaggaaatgatgactaccaccctcgccgtacagcaggcttataaagcgaaggtgaaggagctgatcgccattcagaacagcgaaatgcagcgtgcgggcacgcaggtggaaggggatttcaggtctaaccgtctgctgctgatcctcctcacgctctttagcgttggggcaggcagcctgattggctggtttatcgtgcgcgccatcacccgcccgctcggtgaggcggtgaattttgcaaaggccattgcagagggcgatctgacgggcagcattacgccacacggcaaagacgaaacgggcctgctgctgcatgccctgatggagatgaagacgcgtctgctggacattgtgcagcaggtgcagaccggctcggagaatatctccagcgctgccgcgcagattgtcgccgggaaccaggatctggccgcacgcacggaagagcaggccagctccgttgaacagactgccgcctcgatggagcagatcaccgccacggtgaaaaataccgcctcgcataccggtgaagcgaccaacctttctgccgatgccgccacggtggtcaaaaacaacggtgagatgatgaagcaggtgaccagcaaaatgcgcctgattaacgagacctccaaccggatgtccgacattatcgacctgatcgatgctattgcgttccagaccaatattctggcgctgaacgcggcggtggaagcggcgcgcgccggtgagcacggccgcggctttgcggtagtggccggagaggtgcgccagcttgcccagaagagcgcgtcgtctgccagcgaaatccgcgagctgattgagagctccaccagccagacccaggacgggatgaacctggtcgaaaaagcgagtgggctgattaacggcatggttggcaacgtggaggagatggatgcgatcctgcgcgagatccgtcaggccagccatgagcagacggaggggatctcgcagatcaacagcgcgattggcctgattgatgccactacccagcaaaactccgcgctggtggagcaatccgtcgcggcggcggcatcgcttaacgaacaggcgatgcacctgaaagagctggtacgcgtcttccgcgtgagcgagcacgcaccggcttaatccagctgggagatctccagcgccgcgcggtcaatcacgccgataatctgcttaagctgcgcgtcgctgagctctccctgattcaccttcaggtctaataccgccttaaagttatccagcgcccgcttcatctgtgggtttttgcgcagctgaaagccgacgctgcgcgctttgatacgcacctggatctgttccagctgttcccgattttcgtccagccagcgttgtccttcagcggtaatcgcaatgcgcttacgcccgttctcttcttctgtaatggtgataaacgtctgatcctgcaaataatccagggttggatagatgacgcccgggctcggggtgtagttcccctgggtcaggttctcgatctctttaatcagctcatagccgtggctcgcgttgcgggtcaggatatccagaatcaccagccgcaaatcgccgtggccgaaaaagcgcggccgacgtccgccgccctcgtgttcgtgtcgcatagtattccctttgttttgatatatctaaactatatctaagatatattcagatgcaatctaaaagatcttgcatttttccttattagtaatcattatcatttgaaaattgatttagatatatcgtattcaccagaaaagggtctaaaaatggcatctactcgttatccacagcgtgttcgtaatgacctgcgttttcgcgagctgacggtgctccgcgttgagcgcgccagcgcgggtttccagcgcattgttttaggcggcgaggcgctggagggctttagctcccgcggtttcgacgaccataccaaagtttttttcccggcacccgggacgacgtttacgccgccggtggtcaccgatgaaggcatcgactggggcgacggcgtgcgtccgcaggcgcgcgactatacgccgctatacgatgaggcaaatcatgagttggttctcgatttcttcattcatgacggcggcattgccagcagctgggcggttgaggcgaaagcgggagacaagctgaccatcggcggcccgcgcggttcgctggtggtgccggaggattacgcctggcagctgtacgtgtgcgatgaatccggcatgcccgcgctgcgccgacgcttagagagcattgctcaactgccggttcgcccggacatacacgcggtcgtgacggttggggatgaatcgtaccaggactatctggcggacctgagcgcgttcaatatcacgtgggtggtgggccacagcgagcaggcagtcgctgaccatctggcggcgctgactgttccggaggacgattactttatctggctgaccggggaagggaaggtggtgaaacgcctgagccgtcagtttgaaaccgacgcgattgacccacagctggtgcgtgccagcgcatactggcacgccaaataatcaggctgccgaatccagctgcgcttcgctcacctgatgttcgagcgaggcgcggacctcgtgcagcgctttctcctgctgagcaaagtacgcttccatattgctcagcgacgagaccagcagccaggactcctctttctccagctccgccagctcgttcactaaaatgtcgatttgctcgcgaacctgcgccatttttttgcggatacgttccagatcgttcagcctgtcgcttgccatcaatggctcgaagccctgctgcaggcgggccaccaacgaacgaatggctttcacatctccgcgctgcttcgcctggttaagctgtaccatcatgctgttggcttcttctttcaaatcgtccgccaccagatccgggtggcagagcttgctcgcctgccgccagagacgcttgagctcgttctggtcctcttgtgaaagatgcttacctttgcgcagccgcacttcggcatcgtgatgctgttcgcgatacttctcgtactcttcgttcgcctcgtcgcgcgcctgacgcgcaggctcctcttcgcgcgttaagccgctctccagctccagcgcttcggccagcaggttggcaatcagattgctttgctgctccagatgcttacgcgcctcggcggcctgcacggagtccgccgggagatcgcgccagcgctgggtcagcgtcgccagcacctctaccgcctgcgccatatagtgctggcagcgacggtaatcctcctcgcgacgacgcgcttccgcctgctgacgacgcaggttcagctccgccagcgttttacgcagggcgaggatctgctgcatcagcggccccaggcgggagaaatagagatcgttgaactcatcaagctgctgcacccgcgcgttgcggcggtcaatcagatcgcgcagacgctcttccagcgccttcagttccagcttgctggccgccacctgcggatcgcgccacggcgtcacggcgcgctggccctgcagccaggcggtaatggccgccatggccgcggtgtagttcttctcctcaagcgccacgacgattgcctgtagatcatcgtcaaacgcttcatttttcaggcgtgtcagctggctccggatgatgtcgtcatcttccagttcaatggcatttttaatgatttctagccgtttgatcggtgtgctcatgatgcctttcgctttggcgcttaagtatttgagttaaggttagttgttgtaaaagctacaggaaataatacacacggatgatgatcggcgcgatgggggatttctttagtttttagggtttgtgagggtgagcggcaggccggactacgtgtgattgattccgtatgtgcttgcatagggtgcaacaaaaatcagaggcggtaactgccagagaatgcttaacagcattaagcatgatttaaataccccaaacgtgtaagaagtgcggagagccggcaccgggtgatcgcgcgaggtattgccatcgagggaggctacgtgctggcagacctaaggtgcgaaagaattggtactaaaaacaatatagggcggattaaccgcctttttttacgctgttacacgctcgttccacgcgtctgaatattggacgttcccatcgcaatacttccaggtgatccgctcatagcgcagctgtacgccctcattatgattatgcatctgtaaacctggctctttgcagttatgcataactgggttaatgctgactatccggacgttttccaacagcatgttgaaatactctacctcttgccccgcatcgttgattttataccacttaatttccgcgcttttcagcgtctgcccggtagctacggccttataaagatatgggctggagctatcaaactccttttctattacgagcggcgcatgtacgcgtgtgccggtgattttgcccgtgttgttatcggtaggaactaacaggccgtgactaaaagaaagcacctcaatgcttccctcgcggttttgaacatccacagatccataaatcgggttgccgccatcgtctctaagccacaggtaagcaggaatagccatttttaaaactccattttatgtaaagagaataaaccctcattaacggctaaaaaccgatcgcaggtgatacaaattgtgttatagattcgtgttatttaatcgggttacttattgatgttgcaaataaaattaatagattgatctcaaacagtatcgcgccgtgctgttgctcttatgttgctggttttgccaggcaaaagggaataacgatggcatgtataccgatttacccgccccgcgggctggagatattgcgcgaacacatcaggcttgcgcgggcgcgtcacggagttcaggacatggccaccccgcttacgtatacgtggttttatgagcgagtaaggaacggtgggacgtgggattacaaacaacaaaaacgggcttacgctgacttcggaaattttcattacggcgctgtaggttatgcagcgtgcatccctgaaaagattttgcttattgccgctggcgcggcgcagtggaaggccggcacatcaaggccggaatggggcaattttacgggggccccgccgtttggtgatgatccgatggaccaattttggataaagcaaggcatagactatgttaagcagcaccactattaaggcgtttaagacgttgcattgggtggctacattcaccatggctatcgtgattgcgggatactgttattttcagcatatccagcgcttaacggtgagtgacaaactttatgaggttcgccaactcacgccccgtacgtggttatatataactgaatatgacggctcgaacatgaccacaggggaagtatatcgttattttttagcaagcaagattgacggcgatccgctggcggctctcgaaaaacaacatatcgccccaacgcttaccgcgaacaccgcccgtgcgaaagttgacggcataggcaacaatatctcatttactgtttatggcaccgtgtacagctttacaacgtccgcatttttttatgatgctgagggaatagctgccgcgccgtcaatcgacttaacggcccatggcgagggctggggcaaggggaaatttagtcgatagataattatttatttaaaaatcccctgcggtcgtgtcaatgacccgatgagccgcgtgtaagtttcacggcgtacccgtagcggttcatggatcaaaagtacattgtgattgcccgccgggtattacccatgcaggttaatggctggggcgagggggagatccggttgatattgtcagggaagaacttccctgcaaaattacagccagaatcccctacatacgatctgcgaattcgcagaaaattaccgttaaaaaacgaaaccgacacgcggatccgtcaaaattacgaattcgcaatttgaaatgttaagttttgctaaggttctggcgctcgtcacaaataacagttcacagcatgaatctctaaaatgtgatgatggacacgccgggcgcaggacataatatcattttaattgttgtggtttatgcagtttgctccactagctgcaaccggcgtgagtgcgccccaaacattaccgcacccgcctgcggttttgggatcattaaaatttttcagttttatttttcttcaaaccagaccgccagaccgcgccagtgctggcggctttgtggaaaaccgaaactgaaaaagattgaaaagaatttcagtatttttcagtgaaatggatccgatgaggattttgtgaattctcaaccaacagataaataaggatatttattgttttatgtgaagctggaggagcgagtcatatacagaaacataactttgaaaaattagcagaagtcaaatggggggcgggttgacagtgaaatttacaatgggactggagtgaaaaaattgaacgacctagatcattttttgcgagtgggcaaactgtacttcatatgggaatctgcggaaacttgggatgcaacaatcgaaagcactggtcatggattaagccgcgtggcgtagcatacaaaacagagcaaccgacgctcaccgatgcgatttagcttaataacaagagttgtaagcaattttataaggaaatataactttttggctcagtggttgagccgaaccgtccgggatttggctcaattggaattcttcatctacgattaatttgcatggctagcccacaagtgccttgattgtggcttcggctgccgatcccaataccgacattacaccaaaatttatttcctgaagtgaagccagactcatttattcttagttcatcaccatttatcttaacttctaccccgttgcaatataggctccctcttgttatcacaactttattaggaggtttaaaatcaatctcgagcaaaattactctctctttttctcttatagtcaattttgtgccgacaagttgtatgtcccaagcattaatgttgtaaatcaactggttgtttatgattgacagcaaagggttattttcacggtcgaataagttaacgttgagcaagatatgattgtcttgaataacaaaacctataagtggaattccatccaccataactggagcgccccaaacaaaggattgttcttctgtgatcggagtgaaaaactcatcagtcccaatttttacgctcatctcggagcctgaaaaatgaagcgtgtatggcggagatacccctgcacgaaggttgaaagggtctagattggctttgcgtacatcttcttttggcagccacccattagttttttctttatgatgtttatcacatagcagggtaatctcctcagcaacgtgtcttttcacttccgcccattcctccatatgttcatattcatataggggggtcccacaaattacacatccaaacccacagcgttgccggacttccctctgaataggtcttggtatgttcctgctcgtacatgcagcactttcagtcatattgcgtttcctcggattagtcgacgtttgttgccaaccggtctaagaaagatagaacagcgacaaaattttctttaagaagaactctgctaaatcaatgtacttgtatggagtgggtctggaaagacatgataccgaaaaatcttgcgacacttttgcgacagtcatatgttagacaacaaaaaagccactcaatcgagtggcttaatcatatgattttaaagctaaaatttggtggcccctgctggacttgaaccagcgaccaagcgattatgagtcgcctgctctaaccactgagctaaggggccgtggcggtgaattataaagtaactccccgcagcaatccagccattcacacctgcatgctgtttttataaacaacgcattatcaatcctttatacttccataacgatgtatcagcgggagtaaagatgatcaacgacattctggcccctggcctgcgggtggtgttctgcggaatcaacccgggcaagtcctcggcgcacaccggttttcactttgcccatccgggcaatcgcttctggaaggtgatctaccaggccgggtttaccgacaggttactcaagcccgaagaggagcagcatctgctggacacgcgctgcggaattaccatgctggtcgagcggccgacggtacaggcaagcgaggtcaacctgcatgaactgcgcagcggcgggcgggagctggtgaagaagattgaagactaccagccggccgcgctggcgatcctcggcaagcaggcctacgagcaggcattcagccagcgcggggctaagtggggtaagcagagcatcatgattggcgttacgcaggtgtgggtgttgccgaacccgagcgggctcaacagggcgacgctggacaagctggtagaggcgtatcgggagctggatgaggcgctgatggtacgggggctttagggcttctacggcctgatgccctcaccttgaccctttcccacaggtcgaggcaataaaaaagctccccgaggggagctttttcactgtcagaacagattagtcgtccaggaagctacgcagcacttcagagcggcttgggtgacgcagcttacgcagcgccttcgcttcgatctgacggatacgttcgcgggtaacatcgaactgtttacccacttcttccagcgtgtggtcggtgttcatatcgataccaaaacgcatacgcagcactttcgcttcacgggcggtcaggccagccagaacatcgtgcgttgcggcacgcaggctctcggtggtagcagagtcaagcggcagctcgagggtggtatcctcgatgaaatcacccagatgcgaatcttcatcatcaccaattggtgtttccatggagattggctctttggcgatcttcagcactttacggatcttatcttccggcatcagcatgcgctcggccagctcttccggcgtcggctcgcgacccatctcctgcagcatctggcgggaaatacggttgagcttgttgatggtctcaatcatatgcaccggaatacggatggtgcgcgcctgatccgcgatagagcgggtgatagcctgacggatccaccaggttgcgtaggtggagaacttgtaaccacgacggtattcaaacttgtctaccgctttcatcagaccgatgttgccttcctgtatcagatccaggaactgcagaccgcggttggtgtatttcttggcgatagagataaccagacgcaggttcgcttcaaccatctctttcttcgcacggcgggctttcgcttcaccgatggacatgcgacggttgatatctttaacctgctcgatggtcaggccggtctcttcttcaatctgctgcagcttctgcaggccgcgatacacgtcttctttcacgtcgtgcagtttttcagaccacggcttgttcatcgcaatagccgcgttgaaccaggtttcgctggtttcgttgccggtgaagagggtgatgaagttcttcttcggcattttgcactgctcaacgcacagcttcatgatgatgcgttcctgggtacgtacgcgatccatcatcacgcgcatgctgttcaccaggtagtcgaactgttttggcaccaggcggaactgtttgaacacttcagacagtttcaggatctcttcctgagcggctgcgtggctgcggcctttcgctttgatggtgtcacgcgtcacttcgtactgggtacgcagctcggcaaacttctcgcgcgccagttccgggtcgatgctgttgtcatcatcggcgctgtcgtcgtcgctctcttcctcatcttcgtcttcgtcatcatccatctcttcctgagacagttcagaaccgacgtgagtggcggtaggtgccatatcttcttcagcgttcgggtcgacaaaaccggtgatcaggtcagacaggcgcgcttcttccgcttcaacgcgatcgtactgctccagcagataggtgatcgcttccgggtactcggcaacagagcactgaacctggttgatcccatcttcgatgcgttttgcgatgtcaatttcgccttcgcgggtcaacagttcaacggtacccatttcgcgcatgtacatgcggaccgggtcagtggtacgcccgatttcagattccacgctggacagtacctgtgcagcagcttcttccgcatcttcgtcagtgttgttggaggtttcagccagcaacagatcatcggcatccggtgcttcttccatcacctgaatgcccatgtcattgatcatttggatgatgtcttcgatttgatctgaatcgacgatatcttccggcagatggtcattgacctcggcataggtcagatagccttgctccttaccacgttggacaagaagtttcagctgtgactgcgggttttgctccataagacggtatccacacttaattcgtttgattggtgtcggcgatggggctgccaacctttaaagcgagggcgtacttatatttttgccgctgcctctcagtgcggctgccgggggcttcccgatcgatattcggcacttaagccgttaaatttctttatttcttcgccagttcctggttaatcatccagagctcccggcgttcttcgctgctcaaaccgtgtgtgcgctcgcgagctatcaactcttcctggcgcagctcaagcatcgaatcaaacatatggttgagtgagtcggtgaacgttttttctgcaatgtccttatctgctatatcgtcccacatcgacaatttttcaagggtagcggcctcttttgtgccgcgataatgctctaaaagttgtccggtggtcagacctggctgagacaaacacgtgttgaccagttctgaaaataagccaagtccgggcaatttttcgtggttcaaacccgccagcgacggcacctgtggcgccagctcggggttttgtaccagtaaccctatcagtatacgcatggttgtgcgttttagctgaggcgcggggcgaaccgcaccgttttcagcctgtttaggcattaaacgttcaagctggctgtcatccagaatgccgagcttgttgcctagctcctgacgcaggtagatgcgcagcgtttcgccgggcacctgactgattaacggcagcgccagcgtgctgagctgcgcgcgcccgtcaggggtactcaaatcaacctgcggcatcaggctgttaaacaaaaacgtggagagtggctgtgcctgctccatccgcgcttcaaatgccgctttgccctctttacgcaccagcgtatccgggtcttcaccgtcgggcaggaacataaagcgcaactgacgcccgtcggtcatatagggtagcgcggtttccagcgcgcgccaggcggcatcgcgtccggcgcggtctccgtcgtaacaacaaatcacgttgttggtcacgcggaacagcagctggatgtgatccgccgtcgtggacgttcctaacgacgcaaccgcgtagttaatgtcgtactgcgccagcgcaacgacgtccatatagccttcgacgaccagaagacgcggaggttccgcgttatcctgctgcgcctcataaaggccgtaaagctggcggcccttatggaaaatatcggtttccggggagttgaggtacttcggcagggcatcacccagcacgcgaccaccaaaaccaattacccggcctcgcttgtcgcggattgggaacattacccgttcgcggaagcggtcgtagcttcgtccctggtcgttggtgaccagcatgcctgcatcgatgagagacttacgatcttcgctattgccgccaaaacgctttaacacgttgtcccagccgggcggggcgtagccaatagcgaaacgcgcaatgacatcgtcgctcagtccgcgcttgttcagatactgacgcgcaggttcagccgcagagtgcttaagagactgttggtaaaacgaattcaggccatccatcagttgatacagcgtttgccgttgatggcgctcgatctgacttggcccactgccagcttcatacggcacttcaaggttatgcattgccgccagctcttcgacggtttcaacgaactcgagcttgtcgtagttcattaaaaaatcaacggcattaccgtgagcaccacagccgaagcaatggtaaaactgcttttcaccgtttacggtgaaggagggggttttttcgttatggaacggacagcacgcatggtaattcttgccctgcttcttcagctttacccgcgcgtcgatgagatcgacgatgtcggttctggcgagcaggtcattgatgaaaacgcgtgggattcttccggccatatgccccaaaatttaagcgacttataaacgaaaacaagccgcgcattccttccggaagcacggccttacgactactactctgtctgtcaattgagggctagggccctcaaccaattagtacagacgagtacggcgtgcgttttcgcgagccagtttcttcgcgtgacgtttcacagcggaagctttagcgcgcttacgttcggtcgttggtttttcataaaactcacgacgacgaacttcagccagaacacctgctttctcgcatgaacgtttgaagcgacgcagtgctacgtcgaacggctcgttttcacgtactttaattaccggcatgtaactctcacctttaataaattcggtttgccgctggcatcaacgccagcttatttcaaaatggtgcggaattttactgcaaatgctgctgctttgtaaagcaccgatgcgattttgaaagggactttaataagggtgaggagtatacacgagccttcttcctggggcgaacaaagttttacatcaacccgcccaggctctacactgcgcggtattgaaacgaggtaaaacaagtcatgcatgtactgggtattgaaacatcctgcgatgaaaccggcatcgccatttacgacgacgaaaaagggcttctggccaaccaactgtatagtcaggtgaaattgcacgctgactacggcggcgtcgtgcctgaactggcctctcgtgaccacgtgcgtaaaacggttcccctgattcaggcggcgctgaaagaggccgggttgagttcaaccgatattgatgccgtggcctataccgcggggccgggtctggtcggcgcgctgctggtcggcgcgacggttggccgttcgctggccttcgcgtgggacgtgccggccatcccggttcaccatatggaagggcaccttctggcgccgatgctggaagagaatccgcctgaattcccgtttgtggcactgctggtctccggtggacatacccagctgatcagcgtaacggggattggcaagtacgagctgctgggcgagtcaatcgacgacgctgccggtgaagcgttcgacaaaaccgccaagctgctggggctggattacccaggcggcccgatgctgtccaaaatggcggcgcagggaacggaagggcgctttgtcttcccgcgtccgatgaccgaccgtccggggctggacttcagcttctccgggctgaaaaccttcgcggccaacaccatccgcaataacgacgacagcgagcagacccgcgccgatatcgcccgcgcgtttgaagatgcggtggtggatacgctgatgatcaagtgcaagcgcgcgctggatcagaccggcttcaagcgtctggtgatggcgggcggcgtcagcgccaaccgcacgctgcgcgcgaagctcgccgagatgatgcaaaagcgtcgtggggaagtgttctacgcccgtcccgaattctgtaccgataacggggcgatgatcgcctacgccggtatggtgcgcctgaatgcgggggcaacgtccgacctgagcgtgtccgtgcgtccgcgctggccgctggcggaactgcctgaggcgtgagtttttttgcccggtggcgctgcgcttaccgggcctacaaaaccgtaggccgggtcaggcgaagccgccacccggcaataacccgcactacacccgcagcatccctttctcttccagaaacgcaataatcgtccccagaccgtctcccgctttcaggttggtaaaggtccatggacgctcgccgcgcatgcggttggtgtcgcgctccatcacctccagcgacgcccccacgtacggcgcgagatcggttttgttgatcaccagaaaatcggacttggtgatccccggcccgcccttgcgcgggattttttccccttcggccacgtcgatcacgtaaatggtcagatccgccagctccgggctgaaggtcgcgctcaggttgtccccgccgctttccacgaagatcagatccagattgccgaacttctcgctgagcgcttccaccgccgccaggttcatcgaggcgtcttcgcggatagcggtatgcgggcagccgccggtctccacgcccacgatgcgctccggcgccagcgcgcccgcctcggtcaggatgcgctgatcctctttggtgtagatatcgttggtcaccaccgccaggtgatacgtgtcgcgcattgccttgcagagcgcttccagcagcgcggttttgcccgaccctaccgggccacccacgcccacgcgcaggggatgtttgtaatcagccatgttgactcctcaggaacggaatagtcgtgaatattgggtttcgtggcgcgcggaggcgatggcggacagcggcgtagctgctcccagcgcgtcgtcgcgacgtaaaaaggcctgttcaagcccggcggcaaaatggtcgctcagctcgataatcagctgctgcgccgcctgctgcccaaacggcaccagcttgacgcctgccatgaccgcgctctcaatccagctgtagccgaggctcagcgccagctcgcgcacgtcaatgccccatcgcacgccgagccacgccatgccgcaaagctggctttgcctgcacagcgccagccattctgccgggcagtccggctcccagcttttgatgagacgcgtaaaggccgctccgcggttgcgttcttcttcgcgcagttcgcgcgtttcccgacaggcgagcaggtatgccgtccagcgtctggccgtcgccaggtcgttccgattgcaggcctggcagagacggtgaaacagcggcagatcgacgcagaaaaaactctgctccatctgctggatctgccagcgtttaaaggcgtcgacgttcgcgacccagcccgcctccacggcccactccagcccctgcgaccaggtaaacgacccgaccggcaggctgctgctggagagctgcatcaggcgcagccactggcgggcgtgctccatcagctcatcagcgccagcagggcggagacgatcagcccgccgccgaaggttttacgcagaccgtcgtgacggcgcagcagcagcccagcggcaaagctggcgcacagcaccgttgcgctggcgaacataaacccgctggtgaacagccagaagctatggccggacatctccacgccgtgcgcccagccgtggaacatcgccagggcaggcaccgcgagcagcagacggttttcagtcttaaacatcatcacgccgctgaccgccagcgaggcgataatcagcatctccatgccgctaaagccgccgagcaggctgccagcgatggcgccgacaagcatcatcccgagggtggcaaacggcagcaggagcttgcggccgctcagtgccgagagcacgcctgcaccggtgagcatcaggagatgatcgagcccggtcagcggatggaaaaaaccagcctgaaagctgtcggcaccgtggccgggatgcgcgagcgcgggaacggaaatagccagcagtaacagggggagtaacttgcgcatgatggatccttaatgtgaatgggcgtgagaatggctatgggcatcgctggcatacgcgcccgcttctggttcaaacggcaggctggcgtaggtcacctccagcccaaactggcgcagcatgtcgtcgagaacgtgatcgtggtgatagcgcagctcgccgggcatcacctgtagcggcacgtggcggttgcccaggtggtaacaggcgcgggcgagcaggaaaggatcggcgcagcgcaccacggagacggactcagccgcggcgatcacttcgatcacttcgctgccgtcgtcggtggtcagcaggtcgcccccgcgcagcagcaggccgcgcggcagcatcagcccggcttcgcgcccgtcgttcagcgctacgcgggcgcggcttttcacccgtacgtcaatcggcagcgtgacgctggcggtagtcgggtgtgcgtggtccaggcgttgggtcagataaatcatcatcactcctcaaaacaggaaatagcgttgcgccatcggcagaacgtcagccggttcgctggtaatcagttcgccgtcgacgcgcacctcgtaggtttgcgagtcgacggttatgttcggctgcagggcgttgtggatcatgtccgcctttttcaccgtccggcagcctttcaccaccgcggtggcgctctgcaggttgagctgctgcgggatgccgttcgcactggcggcctgcgagataaacgtcagccgtgtggcgtggcgcgcggcgcccagcgatccaaacatcggacggtaatgcaccggctgcggcgtggggattgaagcgttgatgtcgcccatcggcgcgcaggcgatcatcccgcccttgacgatggtggcgggcttgacgccgaagaacgccggggaccagaccaccagatctgccagcttgcccgcctcaatcgagcccacttcatgggcgataccgtgggtcagcgccgggttaatggtgtacttggcgacatagcgcttcacgcggaagttgtcgttatcgccggtctcttccggcagcgcgccgcgctgaaccttcatgcggtgcgcgacctgccaggtgcggataatcacttccccaacgcggcccatggcctgcgagtctgacgacgtgagcgaaaacgcgccgatgtcgtgcagcacgtcttccgcggcgatggtttcacgacgaatgcgggattcggcaaacgccacgtcctcggcaatatccgggtcgaggtgatgacaaaccatcagcatgtcgagatgctcgtcgatggtattgaccgtgtagggcagcgtcgggttggtggaggagggcagaatattcgggtgcgcgcaggcggtgatgatatccggcgcgtggccaccgcccgccccttcggtgtggaaggtgtggatggtgcgcccgccaatggcggccagcgtatcttcgacaaacccggactcgttcagcgtgtcgctgtgcagcgccacctgaatgtccatctcttcggccacctccagcgagcagttgatcgccgcaggcgtcgcgccccagtcttcgtggatcttcagcccgatggcgcccgcggcaatctgctcgcgcagggccgccgggttggagccgttccccttgccgagcaggccaatattcaccggcagcgtatcggcagcctgcagcatgcgggctatataccacggccccggcgtgcaggtggtggcgttggtgcccgccgccggaccggtgccgccgccgatcatggtggtgacgccggagaccagcgcctcttccgcctgctgcgggcagatccagtggatgtgggtgtcgatcccacctgcggtgacgatcttcccttcggcggcgatgacttcggttgcggcaccaattggaatcgtcacgccgggctgaatgtccgggttgccggctttgccgacggcaaagatccgcccgttcttgacgccgatatcggctttcacgatcccccagtgatcgacgatcagcgcgttggtcagcaccagatccacgcagtcgtctgcggtcatctgcccctgacccatgccgtcgcggatcaccttcccgccgccgaacttgacctcttcgccgtagatcgtgagatcgtcttccacttcaatccacagctcgctgtcggccagccgcactttatccccggtggtggggccgaacatatcggcgtaagcctggcgcgaaatctcagccatgtttcacctcgcccattacctcgccgcgaaagccgacaatgcgctgcgcacccgagacctgaaccagcgtcacttcgcgcttctggccgggctcgaagcgcacggcggtgcctgccgggatgtttaaccggtagcctcgggtcgcctcacggtcaaacttcagcgccgggttgacttcgtaaaagtgatagtgcgatccgacctggatcggcctgtcgccgtgattttcgacaatcacggtttgggtttcgcgcccgacgttgatcgcaatcgtgccgggctggatctggtattcgcctgggatcatcacgcgctccttagacgatcgggttgtggacggtgacgagcttggatccgtccgggaaggtggcttccacctgaatgtccgggatcatctccggcacgccctccatcacctggtcgcgcgtcaggacgtggcggcccgcctccatcagcgaggcgacggtttcgccatcgcgtgcgccttccatgatgaaggcgctgatcagcgcgaccgattccggataattgagctttaccccgcgcgcaaggcggcgttcggcaaccagcgcggcggtgaacagcaacagcttgtctttttctctgggggtcagttccataacgtttctcttatgtctgccagatacgcggcgaacaggcggtttttgtggtgaggagcgggcgaagcgactgccagatgtcgcgcatcgcccgctggcaaatcaggttgtcgtgggagagaaaacgcaccgacatgaggtcgtccacgagcgtagcgcccgcaaaagtttccagcggtgcgagcagcgcacgcgccgcgtcgagatgttcttctctggccgggtagaacagcagcgtaccgatccacggatgcccggcgacgggcgtaagatcgccgttgctgaggtgctgacgctcaatcagacgcggctcgtcctcaacccagacttcaaggtggctctccagcgtgccgtggctgaaggtctcgccgattaccgggcgtcccaggcagtacagctcccacgccagcagcgtgctggaggccttaaggtgaaagacggaacgcagcgcggcattcgccccggggaagataatggtgtcctgcggcagccactccagcgtggcgtcttcatcaaggtaaaagtgctggctcagacgcgcctgcgggccgctgctgcgatagaacttgctggcgccgggcatggtgataagcgtgtggcttttggcgtccagccgaacggaaatgtccagcgtatcgccgcccacaaccccgcccggcgggtgcagcagataaaggtggcaggtttcgccttcgggataaaatggacgctgaacgataagcggcccgacgtgatgagcggagtgcaggagggttttctcaggggtgtgacaaaactgcagggcaagcgacgcctgccagcctttgtacgaattatcagtgacctgagctgctaacatgctgcatccatctgctcatcatcggggtcgtttcagtatgccctggcagaattgaaggctgtcatatgagtcgcttatggatggtttgtaatgtaggccgggtaagcgcagcgccacccggcaagaaaggcgatgacgttatttatgattagcggtaatcctccgcatccacatcataccccgacggctcccagcggatcgccagcagcgaggccaggccgataaacggcgccagcgcaatcacccagaacacggcagtatccagcgaggcgaccagcagcgggaacaggaacagcgacagcgtcgagctgctgcgcatcagcgtctggttaaggccaacgccgacgccgcgcagcgaggtcgggtagctcagtgaggcaaacgtcatggtatgcgcgcccgggccgaagccctggccgaacaggaagagcgccagcatcgccacggcaagcacgccttcggtggcgccttccgggcgaccaatcagccccaggcccagcagcgcgaccagctggcaggcgtaacccgccagcgacatccgccatgcgccgaagcgcggcacgtagcgtaccgccagcagtccgccgacgaaggcaaacagcaggttaagcaccagagaaatcaggatggtggtcagcatcgactggacaaagaagctggagatgatcaccggcagaccaaacgccaccgcgttataggcgaacgaagagacgacggacagcagcgtggcgagcgtcgtgcggcgtaagtagacgccgcggaacaggttcagatagttggaccatttcgctttattcacgacgggagctggctggctgagcgcatcctgcggcacgtgggcattgatgttatacgactgacgcaaaatagacgccgcctccttcaggttgccctgatttgccgcccagaccggcgattcgctcatgtagcggctgcggatggcgataatcaccagcgcgggtaccgcgccgaagccaaggatcaggcgccacagccagtcgctgtggctttccggcagcacggcgtagaagaacagcaccagcaggtaggagatactgatggcggcataccaggtggggcaccacatggcgacgctggaggccttattgccggggccttttagcctggcgaactcgcttaaaaatgccatcgccacgggaaggtcgatcccgacgccaagccccatgacaaagcgggcacccgccagcacatattcgttcggggccagcgcacaggcgatggcggccaccacgaagaagagcatgtcggccataaagacgcgatagcgcccgattttatccgtgaggtaacccccgagcagcgccccgacaatcgcgccaaacgtaatggcggacgccaccatgccggtaccggcgggcgtcaggttaaattcgcgggtgatatcttttatgccgaaggccagcgcgcccagatcgtaggcatcgaggaaaatcccgcccagcgcgataccgatcacgatgcgagcattggcccggccctgagaaccatcattaacgaggcgtgaaacatccgatgcgctgcgcacccactggatgtcgccatcggaacgttttcctgccgttgaaaggggagttgtttctgtgatttctgccattttcttcttatgtggttgtgttgtgtccctaacagttaccacaggcagaaggtgaccaaaatcacatttggctataaggcataactaaccttacggggcatcttttttcttcctcttgagcttcgtccagattttggtctcctgacgacgccacaggcgctgaatattgtcgtgatgacgcagcaggataaggcaggagagcatcgataccgggaaggtgaactgaggtttgaaccaccagacgtagaatggggcaatcagcgcgctgacgatcgcgcccagcgacgaatagccgctaagcagaatggtgagcagccaggtgccagccatcacgccggttaaatcccagccgataggcgcaatggcaccaaaggcggttgccacgcctttgccgcctttaaaaccgaagaatacgggccagatgtggccgacacaggcagcaatggcaatgaggcccagccagaacggcgtgacgcccagcgcatacgcgccccagacgggtagcatccctttcagaacatcaaaaatcaaaactgctacggctgctcccttgccgccaattcgtagtacgttggtcgctcccggattcccggaaccactttcacgcgggtcaggtaacccggcgatgcggcagaccagaatggcgctggagattgagccgcaaagataggcgaggaggatcattccaggcgcgattgcactcataacgctgttccgttttgaaaatgtatctgtattctcagcatctgtggataatacgcataattcgccggaagtggtatccggtttagccaaaaagcaggcaggtcgtgatggatattgtatttatagagcaactttcggtaatcaccactattggtgtttacgactgggaacagaccatcgagcagaagctggtgttcgatatcgaaatgggctgggataaccgcaagtcggcaaaaagcgatgacgtgaacgactgtctcagctacgccgacatcagtgaaacggtcatcggccacgtggaagggcaacgttttgcgctggtcgaacgggtggcggaagaggtcgcagaattgctgctgaaaaaattcaactcaccgtgggtgcgcatcaagctgagcaaaccgggcgcggtggcgcgcgcggccaacgtgggcgtcattatcgagcgtggcacaaatctgaaagggaagatttaacgtcataatagctaaaccattttaggttataccggtcttaaagctgtatctttcacggtagccgttggggcgaccgttttttttatatttttttaggggtttatagatgagcgatatgcactcgctgctggtggcggcaatactgggtgtggtcgaaggattgacggagtttttaccggtttccagtaccggccatatgatcattgttggtcatctgctgggctttgaaggcgatactgcaaaaacgtttgaagtggtgatccagctgggttcgattctggcggtggtggtgatgttctggcgccgtctgtttggcctgatcggtatccattttggccgtccgccgcagcacgaagggatgagtaaaggccgcctgtcgctgatccatattctgctcgggatgatcccggcggtggtgctggggctggttttccacgacgccatcaaatcgctgtttaacccgattaacgtgatgtacgcgctggtggtgggcggcttcctgctgatcgccgcggaagtgctgaagccaaaaacgccgcgcgcggaagggctggacgatatgacgtatcgtcaggcgtttatcattggctgcttccagtgtctggcgctgtggccgggcttttcccgttcaggcgcaaccatctccggtgggatgctgatgggcgtaagccgttacgccgcgtcagagttctcgttcctgctggcggtgccgatgatgatgggggccaccgcgcttgacctctataaaagcatcggtttcctcaccacgggcgacattccgatgttcgccgtcggcttcatcaccgcgtttatcgtggcgctgattgccatcaaaaccttcctgcagctgattaagcgtatctcgttcattccgttcgcgatctaccgctttatcgtcgcggctgcggtttacgtggtcttcttctgaccgactgccctcagtcttttggctgagggcaatgtttttccttccagtctgataccgcctgaattcgccgttttgtcagctcttcccgaatctccggtcctttgaatcccgcctcgacaacgtccttcgtcggcaccgctttggctacctcccaggctttacgcagtaaacgtccctgcgggtagtcacaggcttcaaacccggtgcgcccgcgcacgtcagcctcgctggtgagcgcgatctgctccacgcgctggggtttgcgccaggcgtcgatgttatcgaacagcttaacgatggtggccggtttcaggatcgggaaggtgtggatcaggtcgtggaattcggccaccagtttcgccagatcgcggatttcgttcggcacgcgcaggcgctggcacagcccttcgacgagcttcacccctgccggaccgtgcccgtggtgccgaggccagagctcttttggcgttaagcctttgccgagatcgtggcacagggtggaaaagcgcacgtccacgtcagggctgagcatggccgccatgctcagggtcatcagcgtgtgcacgccggtgtcaatctccggatgccatttcgccggagccggtacgccaaacagcgcgtctatttccgggaacagcaccttcagggcgccgcagtcccgcagcacctggaaaaagacctgcgggttacgcgtggtgagcgcattctcggtctctttccagacgcgctctggcgtcaggtgttcaagctcgcccgcctcggtcatggcggtcatcagcgccatggtctcatcggcaatgcggaagctgagatgggcgtaacgcgcggcaaaacgcgccacgcgcagcacgcggagcggatcttcagaaaacgccggggagacgtgacgtaagagacggttgcgcagatcgtcctggccgccataagcgtcaataatctggccgtgctcgtcctgcgccagcgcgttaatggtcagatcgcgacgcaggagatcgtcctccagcgtgacgtccggcgcggcatagcaggtgaagcccgtatagcccgaacctgatttccgctcggtacgcgccagggcatactcttcgcggcttttcgggtgtaaaaagacgggaaaatcgcggcctacctgctggtagcccgcgtccagcatctcttccggggtggcgcccaccaccacccagtctttatctttgaccggcagacctaacaacgcatcacgtaccgcaccaccgaccagataactcttcacgcctgacactcccgttttctcttttccagaatgatacgtaagtctggcagagaagacgaattagttcatccagcgatctttacgtttacggcttgggatcaggtgtggcagaaccagacccagcaccagaccgacgcccagcacgccgccgccatacataaaccactgcatgatgatggtgcgctgtttgtcatcgagctgcaggttggcggcattcactttcttctgcgcgacaatcagctcgtttttcagcttctggttctcttctttcaggccgttaatcacgccgtcgctctgcgccactttctgctgcatctcggcggtacgctggttccaggttccgtcgatattgttcagcttgtcggtcagggttttcacctgattttccagatccggtacgcgggtgcgcaggcttggcacggtgctcagctctttcagcgggatccaggacgtgcggccagaactgtcgcgaacctgaccgtagttggtgtccgcgttggtctgtaacagggtgacttcctcgccggcatttaccgtgcccacgaggcgataattatctccggggccactgcgtacccaggtgttcagttcgtcagaaacgtaacgcttctcttcagcgtgcactgcggttgcggcgctaaaagcgagtaaagtaagtccaatcaggcgtaatttaagcatcattagtcgttattttcataaatagtggaacgatagtagtggcaacagtgtctctacgcaaagcattcatcagcaatcagaatcatctgtgtcacgactctacacatttacgcccgtcaaattgctcattgcatggcaatttggcgcaaaatactatgtactgacaaacaaatggcgaggaagttcgccctcattgacgcgtctgtgacgcccgcaaaattacaaggctatggctcaggaaatcgaattaaaatttatcgtcgaaaaagacagcgttgacgcactccgccagcatctgcatacgctctccggcgaacaccatgcaccggtacaactgcttaatatctattacgaaacgccggataactggctacgccgccacgatatggggctgcgcatccgtggcgcgagtgggcgctacgagatgacgatgaaaattgccggccgtgtggtcggcgggttacatcagcgtccggaatacaatatcgacatcagtcagccagaacttgagctggaacgttttccggcggaagtctggccggaaggcgagctgcctgccacgctggcggagcaggtgcagccgctgttcagcaccgatttctggcgcgagaaatggctggtgacggaaggtaaaagccgcatcgaaatcgccctcgatctgggtgaggtgaaggcgggtgagtaccaggagccgatctgcgaactggagcttgagctgctggaaggggacgcaaatgacgtgctgaagctggcgcgcaggctggtgaaccagtccggattgcgccaggggagcctgagcaaagccgcgcggggttaccatctggccgccggaaatgcgccgcgcgtgctgaaagagacgaccattttgcgcgttgcgccgaaagccagcgttgagcaggggctggaagccgcgctggagctggcgctttctcagtggcagtaccatgaagagctgtgggtacgaaatgtgaaaaacgccaaatcccacgtgctggcggccattgccctggtgcgccataccctgacgctcttcggcggtattgttcctcgcaaagcgagcgctcacttacgtgatctgctgacgcaaaccgaaacgctgatgctctcggacgtatctgcgcaaacggcgatctacagtccgcaagccgcttcggcaaaactggcgctgaccgagtttctggtgacgcgcggctggcgcgccttcctggatgcgaaagccgaggccaaaatcgcggaaaactttaagcgtttcgcagatattcatctttcccgtcatgcggccgaactgaagagcacctttgcgtatccgctcggcgataagtatggcgatcagcttccccgtctttcgcgcaacatcgacagcatgctgctcctttccggtgcctacgacgggccacaggcgcaggcgtggctggaaaactggcaggggctgaagcatgccatcgaaacccgtcagcatattgagatagagcatttccgtaacgaggccatttcgcaggagccgtactggctgcacagcggaaaacgttaactctggcaaggaacccttagaatgccgctttcttcaccgttacagcagcagtggcagaccgtttgcgaacgtctgcctgagtcattaccggcgtcatcgttaagcgagcaggcgaaaagcgtgctcgtcttcagtgattttgtgcaggaaagcatagccgtctacccggactggctgacggagcttgagaacgcaccgccgcaggcggacgagtggcggcactatgccgcctggctgcaggccgcgcttgaagacgtcgcggatgaggcgacgctgatgcgcgtcctgcgtcagttccgccgtcgtgtgatggtgcgcattgcctgggcgcaggcgctggaactggtgagtgaagagagtacgttgcagcagttaagcgagctggcgcagacgctgattgtcgccgcgcgcgactggctctacgccgcctgctgtaaagagtggggcacgccgtgcagcgaggaaggggttcctcagccgctgttgattctggggatgggcaagctgggcggctgcgagctgaacttttcctccgatatcgacctgattttcgcctggcctgagaacggctccacgcgcggcggccgtcgcgagctggacaacgcccagttctttacccgcctcggccagcgtctgattaaggcgctggatcagccgacgcaggacggctttgtctaccgcgtggacatgcgcctgcgtccgttcggcgacagcgggccgctggtgctgagctttgccgcgctggaggattactaccaggagcaggggcgcgactgggagcgttatgcgatggtcaaagcgcggatcatgggcgacagcgatgacgcctacgccaacgagctgcgcgccatgctgcgcccgttcgtgttccgtcgctacatcgacttcagcgtcatccagtccctgcgtaatatgaaagggatgatcgcccgtgaggtgcgccgtcgcggtctgaaggacaacatcaagctcggcgcgggcggcattcgcgaaatcgaatttatcgtccaggtcttccagctgattcgcggcgggcgcgagccgtcgctacagtcccgctcgctgctgccgacgctgagcgccattgagcagcttcacctgctgccggacggcgacgcgcaaaccctgcgcgaggcctatcttttcctgcgccgtctggaaaacctgctgcaaagcatcaacgacgaacagacccagaccctgccgggggatgaccttaaccgggcgcgtctggcctgggggatgcgcgtggatgactggtcaacgctgaccgaacggctcgatgcccatatggcaggcgtgcgccgcatcttcaacgagctgatcggtgatgacgaaagcgaatcgcaggacgatgccctttccgagcactggcgtgagctgtggcaggacgcgctccaggaagatgacaccacgccggtgctgtcgcacctaaccgacgacgcgcgccatcgcgtggtggcgctgattgccgatttccgtcttgagctgaacaagcgcgccattggcccgcgcggccgtcaggtactggatcacctgatgccgcacctgctgagcgaggtctgctcgcgggcggatgcgccggtgccgctgtcgcgcatgatgccgctgctgagcgggatcatcacgcgcaccacgtaccttgagcttttgagcgagtttccgggggcgctgaagcacctgatttccctctgcgccgcctccccgatggtggccaacaagctggcgcgctaccctctgctgctggatgagctgctcgacccgaacaccctgtatcaacccacggcgacggatgcctaccgtgacgagctgcgtcagtatctgctgcgcgtgccggaagaggacgaagagcagcagctggaggcgctgcgccagtttaagcaggcccagatgctgcgcgtggcggcggcggatatcgccggaacgctgccggtaatgaaagtgagcgatcacttaacctggctcgcggaagcgatcatcgacgcggtcgtgcagcaggcatgggtgcagatggtggcccgctacggccagccgaagctccttgctgaccgggaggggcgaggctttgccgtggtcggttacggcaagctcggcggctgggagctgggatacagctccgatctggatttaattttcctgcacgactgcccggttgacgtgatgaccgacggcgagcgtgagattgacgggcgtcagttctatctgcgcctggcccagcgcatcatgcacctgttcagcacccgcacttcgtcgggcattttgtatgaagtcgatgcgcgcctgcgtccgtccggcgcggcgggtatgctggtcacctcaacggagtccttcgccgattatcagaagaatgaagcctggacctgggagcatcaggcgctggtgcgcgcccgcgtggtgtatggcgatccgcagctcaaaacgcagttcgatgccgtccgtaaggatgtgatgaccaccccgcgcgagggcagtacgctgcagacggaagtgcgcgagatgcgcgagaaaatgcgcgcgcacctgggtaataaacaccgcgatcgctttgatatcaaagccgacgagggcgggattaccgatattgagttcattacccagtatctggtgctgctccacgcgcacgacaagccgaagctgacccgctggtcggataacgtgcgcattctggagctgctggcgcaaaacgacattatggacgagcaggaggcgcaggctttaacccgcgcctacaccacgctgcgcgacgagcttcaccacctggcgctgcaggagcagccggggcacgtggcgctggactgttttgtcgcagagcgcgctcaggtaacggccagctggcagaagtggctggtggaaccgtgcgtaacaaatcaagtgtgatattatcgcgcgcaaattgtgaatctttctggagtcaggaatgaaagtaacactgccagagtttgaacgtgctggagtaatggttgttggggatgtgatgctggatcgctactggtatgggccgaccagccgcatctctccggaagcaccggtaccggtggttaaggtcgacaccattgaagagcgtcccggcggcgcggcaaacgtggcgatgaacatagcctctctgggcgcgcactcgcgtctggttggcctgaccggtatcgacgatgcggcgcgcgcgctgagcaagtcgctggcggacgtgaacgtgaagtgtgacttcgtttctgttccgacccacccgaccatcaccaagctgcgcgtgctgtcacgtaaccagcagctcatccgccttgactttgaagaagggttcgaaggcgttgatcccgagccgctgcacgagcgcattaaccaggcgttaggcaatatcggcgcgctggtgctgtccgactacgcgaaaggcgcgctggccagcgtgcagacgatgatccagctggcgcgtaaggccagcgtaccggtgctgatcgatcctaagggcaccgactttgagcgctatcgcggcgcaaccctcctgacgccaaacctctccgagtttgaagcggtggcgggcaaatgcaaaaccgaggaagagctggttgagcgcggcatgaagatcattgctgacttcgaattatctgcgctgctggtgacccgctccgagcaggggatgacgctgctgcagccgggcaaggcgccgctgcatatgccaacccaggcgcaggaagtgtatgacgtgaccggtgccggtgatacggtgatcggcgtgctggcggcgacgctggcggcggggaactccctggaagaggcgtgctacttcgccaacgccgcggcaggtgtggtcgtcggtaaactcggtacctcaaccgtttccccaatcgagctggaaaacgcggtgcgcggccgtgcggacaccggtttcggtgtgatgaccgaagacgagctgaaagtggctgtcgccgctgcgcgcaagcgcggtgaaaaagtggtgatgactaacggcgtgttcgacatcctgcacgcgggccatgtctcttatctggcgaatgcgcgaaagctgggcgatcgcctgattgtggcggtgaacagcgatgcctcaaccaaacgtctgaagggtgaaacgcgtccggtgaacccgcttgagcagcgtatgatcgtgctcggcgcgctggaagccgtggactgggtggtgtcgtttgaagaagacacgccgcagcgcctgattgccggtattctgccggacctgctggtgaagggcggcgattacaagccggagcaaatcgcgggcagcgaagaggtctgggccaacggcggtgaggtgatggtgctcaactttgaagatgggtgttccaccaccaacatcattaagaagatccagaaagacagtcagtaaaaaacgggcctattggcccgtttttttatgtcgggtggcggctgcgccttacccgacctacgcgttcattcaggcccggtaaggcgtagccgccaccgggctcaacaggccgcactatgcctggtcatccaccggcggaatggctggcgctggcttcacttcttccggcgcattgcggttttccagctcggtcagacgctgttccagcagtgccagcttctcgcgggtgcgcagcagaacctgggtctgcacgtcaaactcttcgcggctgacgagatcaaggcgaaccaactgcgcctgcagcgtctggcggattttcttctcaacgtcatcaccaaattcacgaatgccttttggcatagactcgtgaacctgacgcgcaatttgctcaattttcttcgggtcaatcattgtcgtttcccttgatgaaaaggtgttagtgtccattgtagcgcgtcatgcccggggtaaacaaaattgtttgatgcttatgcattgcccaggataatcaatagcgttatagttatctcgcttattctcagggcggggcgaaattccccaccggcggtaaatcagcttaacgctgaaagcccgcgagcgctttgggtgaattctcaaaggtcagcagatccggtgtaattccggggccgacggttagagtccggatgggagagagtaacgatccagtcgggcatgggcccgctcacgttatctttttgccgcttatacggcgctcctaagactgccctgattctggtaaccataatgttaatgaggtttttttaccatgaatcagacgctactttcctcttttggcacttcaactcaacgtgttgaacatgcactggatgcactgcgcgaaggccgcggtgtgatggtgcttgacgatgaaaaccgtgaaaacgaaggcgacatgattttcgccgccgaaaacatgaccgttgaacagatggcgctgaccatccgtcacggcagcggcatcgtatgcctgtgtattaccgaagatcgtcgtaagcagctcgagctgccgatgatggtcgaaaacaacaccagcgcctttggtaccggatttaccgtgaccattgaagcggcgcatggcgtgaccaccggtgtgtctgcggctgaccgtctgaccaccgtacgtgccgcgattgctgatgatgcgaagccatccgatctgcatcgtccaggccacgttttcccactgcgcgcgcaggcgggtggcgtgctgacccgccgcggtcacaccgaagcgacgatcgacctggtgacgctggcaggcttcaaacctgcgggcgtgctgtgtgaactgaccaacgacgacggcaccatggcgcgtgcaccagagtgcatcaccttcgcgcgtctgcacaacatgccggtggtaacgattgaagatctgatcgagtatcgccaggcgcacgagcgcaaagccagctgaaatggctgatgtgaaaaagccggggaaacccggcttttttgtctctagtggtagttaattttgaacagcaccaccgtttcgaacggcccggactggatcgcttttccttcgatcggcgacagctctgcggtgtattgctgctcatgctcaagcgtgctgcccgtaaaatccacgtattcgttgtagtggttaaaggtgtagggctcggttccgttaaggatcctcagcttcaggccattgcctatcagcagtgcggtatcgttggccgtaagcgcttcatttgtatagaacgacgagtccattttgaagccatctgaacattgggcatcctgcactttcgtcgtcttcaccgaaaaggtccgtttacgcgtctgttgattcacaatatcgcgtgcgctaaaggtgccgaaatcaatctcctggttctcagggtaaatactgaacgttgccccgcagtccagaacggtaatattttgcagcccgttgatgtgatatttgaggtttttcgcatccgacatctggttcacgccgccttttccgtcaaactggacaacgatgtaatcgctcagcgagctgacgtagccgtgaggcggcatggctttaatttttacgtataagcgcagacgagcaatgaaggttcgtgaagtgtggatatcatccgggttaccggaacagatacgattttcccatcccatttgtcggatctgctcgggggtataaatcgtgatgttttggttgtccagacattgtcgggtatcgacgccgttaggctggccttttgcatcgtagtctatcccttcataggttacgcccagttcataatagggatcggaggttgaaggataaggattcacccagccaaaaatatcctccggttgaaagctgcttgtgacattgtggttgcatgtcaccgggattttgatgtcatccgattcccaaattttctcacctgcctgtgcattactggggatagcaaacggcgagatcgttttagtttcttctacggggccgctcgaaccgcccaggtagcagtcgagcgccagcgcttctcttaaaggcagcactgagagcagcactatgaacaatacgttagcgagattgcgcatctttttcgatcttccgttcggtgagcgagcactgcgccgttcccgcgcactgtacgtcgacctttttcagcgcgccgtaatcgtcgatataaccgatgctgtaatagttaccgtggtagtcaccggtagaggttgttgctgtcgcgaaaggcgcaagcatcaggctgtcgaagcccggcagcatggttttggcattcttactgagccacgccagcgtgatgtagtacggcgtcgggttatgtatggtcagccctttcgcagtggctgaaacttccatccgcatttccgcctgctcgccgggttttttggtaatcgctttagggcgccagaacagcttgatcctgctctgcatcgccacctgcatgacgctgcgttcatcgctggcgctggtgcttttcggcggcacttcgcgcaggttgaaataaaacagggattctctgtctttcggtaactgactggtggccgcttgcttaacgatcctgacctgcgatgcggaacccgcttcaatgcgttgaatcggaggcagcgccatgaaatgcctgtcttctttacggcctttctcatcttcaatccaggagagcgccagatagggcagcgctttactctggttttcaatcttcaggctgctggccttgtcgctttccggaaagacaatgcgcgtgcggtccaggtttacggccgcgtgagtggtgaatgctgtgccgaccagcatcaggcacaggcttttgagtaaggttaatttcatcatgatttcttactgacatggcagtatcaactgcatactgttttcaaggtgtgaaggtaacgtgaagcggcactgctgattgtctccccacgtcacgcgaaactgttgttctggctctacggcgccgagccagacgtggccgtcatcggcgaccatagcaatctgccgatcgtcttcaagctggcgaacaatggcgcccagcggcggcgtgccagaggcagttcgtaagatgcctgcgatatcattgcctgcacgcgtcgcgatctgacggtacccgatggcaccttccgtccaggttgaggtgacgacgcgggtgtcaacgtctacgccatcgggcaggttgttcatattgacctgcacgctggaaggcgaatagctggagatggacggtaaaacgccaatcccgaagcgattggtttcatcccgcgacatgttcagcgggatgttgcctacgccatcggtactgaccatcacgcgcggctcgttaccgtagctgcggcggtgcagcgcagcgcctttagccgtcgaggtgaatgaaccggtccaactggcactcagggaattgtattcgttagccttaaaactcccggagagattcaggtcgccataaggagaataatgttgatagttgccgctcacctgcgcgccggcatctgacttctcgctttcggtacctgccgaaacgccccaggtgttgttgcggtctgatgtgtcataccacgatacgttctgactcagactgtcgctgttgcgcaggtcgtaattcagacgatgatcgggatcgagcggtacgctcagtgagagatagaactgcgtatcgtcgtcttcgtcttcatagtgggttttactccatgacacggtgaggcccagatttttccagcgaccgatatcaaagttatagcctgcggtcacgctgcccgtcgtggaggaggaatcgttccaccaggtttgacgcagcatgttcacatagaggttgagcgatagcgccgaaatgtactggcttgccgtcacgctgagcgtctgtttttctgactgccgatcgttattgtcatcatccagaaaacgggcgtagctgagaaactgcggatcggaatagcgataactggcgagcgtaagctggctgccggtggtatcgaaacgcttactgtagttgaaacggtagctgtaacctgtctggctattctgatagggcaactggctggtcgcctgcgtcacgtcaaaagagagcgcgcccaggtactccatgttttgacctattcctacggcaacggaccggtagcgatcgccatcggcgagtgtaccgccgtagagggaggtttgtgacagcatcccccaggagaattcgccgctcataaacgcgttatcttcaacgtcatgcgaggcgtctttgcgtgcttttcctgccgccagcttatagcgaacctgacctttgcgggttaaaaaaggcaccgattccgcagaaacctggaaggtgcttacgcgcccatcttcttctgtcactttgacgtccagcgtaccctgtacagactggtttagatcctgaataacaaacggccctggcggaacgttgctttggtaaatgacacggtcagccaggctaaccgttaccgtggcgttagtttgcgcgaggccggtaatttgtggcgcgtagccgcgcagcgaccatggcagcatgcgctcatcgctaatcagggaggctccggtataggtgaaggcatcaaaaatagcggactggaaatccgtttcacccagtgtgagtttggctccgagcgaggggagaggacggaacatatagaggcgtgaaaagcgcccgtcattctctgaacctgcgtcggtatgggtttgagtatactgataatcaccgcgcagtcgccacgcgcccatattcgcgccggcagtgccataagtgttgacgttatccgtgctgctgccatcgttcggctggtaatgactggcaaaaagattgtaatctagtagtacgcccggcacgccgttgtcccaggttgaagggggcatccagtctgcggcacggtactgtaaccaggcctgaggtatcgtgaccttcagcgtctggctggattgctcaaaattaaatttaatatccggttttgatgcaaagtcgacgcacccgtctttttccgccaatgcgctacggatattgtcctgcagagcaaatgtatcggccagttcaggtggaatacagacttgtacgctcttgtctatctcctgccagcggagctgccagccatttgccagcgggatatcattaattgaaacggtaacaaaatagtcgcctggtgtgatcgatatttgatctttaaaaagagataaatcaacgctgccacgctgatctttatcgatggcattgatgttaaattcagtggcggaggcaagttccgccataaacagggacgtcataataattatgcattgtaatttatatgtcatcgccctgttactcaaataaatacattcaacgccggctgacattaaatgccagccggtttaatttgaaacatggcgtagttatttatacgccagaatatagttggctgtagcttccacctggccagcagtcgccgttttacccgttaccacttccattaatgctttgaagtgcagcgtttgagtcgttgaacctgccagcagagcaacctcattagcagcacccagcgtaatgttggcttcggcgttattcaaaagacgaacgcccacgttctgtgcaccacttgcataggtattggtcatcagactggtgtcggtcgcgtctgtcgctgagctggtaaacgtgacatcgactttggtcactggtgtgtcagtctcgtcggccggatcgtcaagctggcagttttccagattgatatcaaccggaactgcggaagacttcttgttggcattgatcacggctgtggtcacttcaccgagatcgacttctttatcaacgctgtctggtgcaatgctgcaaggcgcatcaataacaacgcctttgaatttgatttttcccgacccctgctcggcagcaaaggcggaacccgatactgcggcagcgatagttacagctaatagaatttttttacccatatacatgaaaatatcctttttcaaacgaattcatactctgaatataagtttcaaaacgcaaatggagtatatgggaggacgaaggggagatgcgattactgcatcttaaagctattttaagattatattaatatataattaatgttgattgtaagcattggctaacattcataatatatgcagtaactcagataatagactgataaaatttcatcattctatttctataagctatatattttgcaagggctttgttggcaacaaaataacgtattatttctatctatatcttaacgtttcgaaagtctgcctccgtattatacggaggcagactaatcctaaccgatacctgcagattgcaataacaccaggcttaagcccatgaccgacattccgcacagcacgccatagctggggttgttattgggatcgatctctttcgccagcggcattaattcatcgacggaaagcgccaccataatcccggcaactgtggccataatggcggccatcacgacaggggagaccaggcttccgagaatcaaccaggccaggacaccgccgaggatttcagccatcccggaaattcctgcccagaataccgcggtacgtttcgagcccgtggcggcatacaccggtccggcgaccgcgagtccttcaggaatattgtgtaaggccaccgccagcgcgatgccaaagcccatttccagattgctgctggccgtcacgtaggtcgcgaccccttccgggaaattatgcaggctaatccccagcgtgagcagaaccgctgttcgcttaatattccgcggcacaggcgttacgtttttctgcattaaatcctggggatgcgcgtggggtagcatccggtcgagggcaaagtaacccagcaggccaacgacaaacatgccgtagcccagcaggggagacatcccgtcggtgcccagcgcagcagggagcatctccatcagggagataagcagcatgatcccggcagcaaagcccagcgagaaggccagcacgcggtttgacggcttctgaccaagcacgccgaggattgcgccgataaaggtcgcggcgcccgccagtatggtcaggatcagagggactgacatggattgctccttatgataatgattatcattaatataaatgattcatttctggcaaagcgaggggcgacccccggctttacacattccttacattcaaaattcctgatgatgatcttcacgcttatcagcgttcatctttgtccgattgcgcgtaatgtagcaccattaaattgacaccttctgtaaggatatcatcatgacttcttcccgtatgccagccctgtttttaggccacggcagcccaatgaacgttctggaagataacgtatatacccgcgcatggcgtcatctgggcgagacgctgccgcgtccaaaagcgattgtggtggtatctgcgcactggttcacccgcggcacgggcgtgaccgccatggaagcgccaaaaaccattcatgattttggtggcttcccgcaggcgctgtatgacacgcactatccggcccccggctcgcctgagctggcacaaaggctggtggaactgctggcgcctgttccggttgcgctggataaagaagcctggggctttgaccatggctcatggggcgtgctgatcaaaatgtatcctgatgcggatatcctgatggtgcagctgagcatcgacagcaccaaaccggctgcctggcatctggagatggggcgcaagctggcgacgcttcgtgatgaaggcatcatgctggtggcaagcggcaacgtggtgcacaatctgcgtacggcgcgctggcatggcgaaaacacgccatacccgtgggcgaccgcttttaacgactacgttaaagcgaacctgacttggcaaggcccggctgaggcgcatccgctggtgaactatctggagcacgagggcggttcgctctctaacccgacgccggagcatttcctgccgctgctgtacgtgcttggcgcgtgggacggtgaggagccggttacgatcccggtcgatggaatagagatgggaagtctgagtatgctgtcggtgcaggtagggtgaaaatatgcccggtggcgctacgcttaccgggcctacaaaaccgtaggccgggtcaggcgaagccgccacccggcagatcttactccacaaaaatatgcgggtagaaccgcgacagatcctgcgtgatcagcgcgcgatcttcgcgaatgccaattccggcaggttgatcgttaatgagccagctgccaattagcgtatagctgtcgccaaatttcggcagttgatagaacgcctggacgatcatcccttcctcgccgtaaggcccttcaaccgcttccagcgttttaccgttttcgatgatcgacacgttcgcgccttcgcgggagaagatcggcttaacgacgtatttctccatctgcgggtaatcatcttccgcaaagtacgctggcagcaggttagggtgattcgggaacatctcccacagcatcggcagcagggccttgttggagataatgcttttccaggccggttccagccagcgcacgcccgcatcttccagcttggtggagaacatctcgcgcagcatgtactcccacgggtagagcttgaacaggttgctgatgacctgatcctgcatgtccgtaaactgacctttttcacccaggccgatatcctcgatatagaggaactcggtcgccacttccgcttcggcggcgcagtcctgcagatactgaaccgtgccacgatcttcttccgtgtcgcggcagcaggcgagatgcagcaggttgaagccaaactgctcgcgcagctcggcaaagcgctcgatcagcttctcctgcaggctgttgaactggtcgctgccttccggcaggtttccggcgttaatctggtcttccagccagatccactggaagaatgccgcttcatagagggaggttggcgtatcggcgttgttttctaaaagcttcggttcacccacgccgtcccacgccagatccaggcgagagtaaagcgaaggctgattcgttttccacgactggcggacaaagctccaggtgtgctttggaatgcggaacttggccatcagctcgtcgctgtcgatgactttttccaccaccttgaggcacatctggtgcagctcagccgtgacctcttccagcttctcaacctgggccagggtgagcctgtagtaagcgtcttcacaccagtagggctcgccgtacatggtgtggaagttaaagccgtactcggtggctttttcgcgccagtccgggcgctcggtaatactgactcgttccatgattagccgcccattgagcgagtagaggtgcctgatgcactgcgctgcatgctggtctgtttcgccacagactcaccgaacccgccgcgggtgatggtgctggtggtcgcaggcttcggcgccatcgcggttttcggtacggttacggtgcggcccggagtcgctgcgccgtagcctttaccgctggcatcggtatattgaccgtaagccgggctggccgggtttttcgagctaaacagcggctgctgctggtagcctgcaccgccgcccatcagacggcccatcatgtagcctgccatcagcggcatccagaagctgccgctggattgcgcctgtgcctgattttcaggtgccgtgcctgcctgagccggtgcctgctggcactgaccttcaccaaattccgctacgcagtcttcgcgtgaggcatatttcggcgcggtgcgttccgcttctttcagcgcgttggtgtaggccgttttacattcggccgctttgccggttgcggcggagcagtcgtccgcgttttgatacagcgaaaccgtttcatcgtttttctcacagcctgccagcataaagacagcggtaaccgccagcgcaacaggggtgaggtgacgtgcgttccagctcttgcggaacgacgcgtgattgatcgtttttgtccgtttcatgtttgtcttccaggacccagtggtaataacgctcaggatagaggatgagtggttgaaaatgaagcgaagaggggcggaatcagggggatctttacgttggcttacgttcggatgtgattttgcgccgggtggcgctgcgcttacccggcctacgattcagtaggcccgataaacgaagcgccatcgggcaatgcttagttacggaacggattgttgcccttgctggcaggcgctgtggtgcgcgcggcagcaggctgtgcagcaggggtagtgccgttagcgttgaagttatcaaccgcggcaacctgctccgggttctccggtgcaacgctgtccggtgaggtagagaccggcttgcccagtgcgctattcagcatctgcaggtcttgctcgttcagcgtacccagagcctgcttaatgttcagctggttaatcaggtactgataacgcgcgctggagagctgctgcttcgcgttgtacagcgtggtggtggcgtcgagcacgtcaacgatagtacgtgtaccgaccgagtaacccgcttccatcgcgtccagggagctctgtgcagacacaacggcctgtttataggcgttgatgctgctgattgaggcgttcacgttgttgaaggatgaacgtacggtctgcaccacgttacgatgggcgctttccagctgctcgctcgcgccaacaaagttgtactgcgcctgtttcacctgggagttaacctgaccgccctgatacagcggcaaggagaagctcaggcccactttgttctgacccatattgctgtcgtcatactgggcagaattggttttagagccactgtaggtggtgtcagaaacgccggtagaggcgctcaggctcagggttggcaaatggccgtcctgcgcctgacgaatctgctcgcgggccaggtcctggctcagacgcgcctgcagcaacgtcaggttgcggttttccgcctctttcagcagggcgttaacggcctccggcttatccgttttgaagctgtcgacgttcagggaggccagctcaggatagtagttcccggtcacctggcgcagggattccagcgcgttgtcgaggttattacgcgcggtcacttcgttggccagcacggtgtcgtactgtgaacgggcgttttgcacgtcggtgatcgccaccagacccacgttgaagcgctgggtggtttgatctaactgacggtaaatggcctgtttctgcgcttcggtgtaggagagcgcgtcaatggcgctcagcacgttgaagtacgccgtagctgtgttcaggatcagcgtctgctggtcggtctgataggtcacatcctggatgcccgcgctcttttcctgcagggtcagggcacgccatttggacatatcaaacagcgtctgtgttaattgcagtgaggcactggtagcattggagtttacgccgttagcgtcgcgaaaaccgttgctgtaggtataatctgcacctaaccctaactgtggcagcaaggggctacgcgcttcgttaatcttttcaaacgcagcatcacgatcggccgctgatttacgtaaatcagggttgcccagacgtgcctgctggtagacctgtaacaggttttccgcctggctcattgcactgaagcccgtcaggctcaggccgataaggatggggagcaatttcttcatttgcattccttgttgtgaagcagtattagcgctgatctaattaaaaaataattgccgattctaacagaatcatccacaccaaaaggttggcgttacgtgccatctggcggtaatttgcaccaatctatcatatagccttacaaacggcagccaaacagccttgaaattcacaatttcatcaccattgctaccaggactcgactcatgcaaaaaccagaaaagttgcccgtgacattcgccaaaaacgatgtagaaattattgcacgagaaacgctttatagcggttttttttcaatggatctttaccgtttcaggcatcgcctgtttaacggtgaaatgagcggcgaaatcagacgcgaaatttttgagcgcgggcatgcggcagtcttgctaccctttgacccagtgcgtgacgaagtcgtgctggtggagcagatccgcatcgccgcttatgacgtcagtgagagcccgtggctgctggagatggtggccgggatgatcgaagaaggcgagacggttgaagacgtcgcccggcgcgaggcgctggaagaggcggggctggtggtgggccgcaccaaaccggtcttgagctatctggcgagtccgggtggcaccagcgaacgcttatccattatggtgggcgaagtggacgccacgaccgcagaaggcattcacggtctggctgatgaaaacgaagatattcgggttcatgtggtgagccgggaacaggcttatcagtgggtagaagaggggaaaatcgacaacgcagcgtctgtcatcgccctgcaatggctgcagctgcattatcagacattacgaaacgagtggaaaaaatgaagcgctatacgcctgacttcccagaaatgatgcgcctgtgcgaaacgaattttgcacaattgcgccgcctgctgccgagaaacgacgcacccggcgaaacggtaagctatcaggtgagcagcgcgcagtatcgattaacgataacagaatcaacgcgctacactacgctggtggagattgagcaaacggcacccagcattagctactggagcctgccgtcgatgacggtacgcctctatcacgacgcgatggtcgctgaagtgtgttcaagccagcagatctttcgcttcaagacgcggtatgattacccgaataaaaagttgcatcaacgcgacgaaaagcatcaaattaaccagtttttagccgactggctaaggtattgtttagcacatggagcaatggcgattccggtttgttagcgtcataaacctacctaaggacaccatttggaaagcctgttgaacctgactgttgctggtggggcgccagtcaggatattacaaatcaccgatacccacctttttgccgaaaagcatgaaacgctgctgggggtgaatacctgggagagttatcaggcggtactgagcgccattcacgctgaaaaccgtgcatgcgatctgattgtcgcaacgggcgatctggcgcaggaccaatcttccgcggcctaccagcattttgctgaaggcatcgcgagctttagcgcgccctgcgtctggctgccgggtaaccacgattttcagcccgcaatgtacagttctctccaggatgcggggatttctccggcgaaatgtgtttttgcgggtgaacagtggcagatcctcctgctggacagccaggtgttcggcgtcccgcacggtgaactcagtgagtttcagctcgactggctggagaccaaactggcggctgaacctgaacgtcatacgctgctgttgcttcatcatcatcctctgccggcgggctgcagctggctcgatcagcacagcctgcgcaactccgcggcgctggatcgcgtgctggcgaagttcccgcgggtgaaaaatctgctgtgtgggcatattcaccaggaacaggatctcgactggaacggacgccgcatgctggcgacgccgtcgacctgcgttcagtttaagccgcactgcgccaactttacgctggataccatcgcgccaggctggcgctggctggaactgcatcccgacggcacgctgaccacggaagtctgccgtttgaccggcgcacagttccgcccggacaccgcttcagaaggctattgatgtctacgctcctttatctgcacggatttaacagttcgccgcgctccgcaaaagcgacacagtttcgccagtggctgagcgcgcatcaccctgacgttgagatgattatcccacagctgccgccttacccggcagaagccgcggaaatgctggaatccatcgtgcttgcgcacggcggcgaaacctttggtgtggtcggttcatcgctggggggatattacgccacctggctctcgcaatgctttatgctgcccgccgtggtggttaatccggcggtacggccatttgagctgctgcgggactttcttggcgaaaacgagaacccctacaccggccagcaatatgtgctagagtcacgccatatttacgatctcaaagttatgcaggtcgacccgctcgaggcgccggatctcatctggctgctgcagcagacgggtgatgaagtgctggattaccgccaggcagtggcgtattacgcctcctgccgccagacgatagaagagggcggaaaccatgctttcacgggctttgagaatcatttcacccagattgtcgattttcttggactgcacagccactgacaatcaatgcgaattgctagtttaaatcatgacgcaaacctataacgctgatgccattgaggtcctcaccgggcttgagccggttcgccgccgcccggggatgtacaccgatacgacgcgcccaaaccatctgggccaggaagttattgataacagtgtggacgaagcgctggcgggccatgccaaacgcgttgacgtcatcctgcatgccgatcagtcgctggaagttattgacgacgggcgcggcatgccggtggatatccacccggaagagggcgtcccggccgttgagctgatcctctgtcgtctgcatgcgggcggtaagttctccaacaaaaactaccagttctccggcggcctgcacggcgtggggatttccgtcgtcaacgccctgtccaaacgcgtggaagtgaacgtccgtcgcgatggtcaggtctacaacatcgcgtttgaaaacggcgagaaggtgcaggatttgcaggttgtcggcacgtgcggcaaacgcaacaccggcaccagcgtccacttctggcctgacgagagtttcttcgacagcccgcgcttttccgtatcccgcctgacgcacctgctgaaagccaaagcggtgctgtgtccgggcgtggaaatcacctttaaagatcacgttaataataccgagcagacctggtgctacgccgatggcctgaacgactacctgtgcgaagcggtaaacggcctgccaacgctgccggaaaaaccgttcgtcggcaactttagcggcgataccgaagcggtggactgggcgctgctgtggctgccggaaggcggcgagctgctgaccgaaagctacgttaacctgatccccaccatgctcggcgggacccacgtcaacggcctgcgtcaggggctgctggacgcgatgcgcgaattctgcgaataccgcaatatcctgccgcgcggcgtgaagctgtcggcggaagatatctgggaccgctgcgcctacgtgctctccgtgaagatgcaggatccgcagtttgccggtcagaccaaagaacgtctgtcgtcacgccagtgcgcggcgttcgtctccggcgtggtgaaagatgcctttaccctgtggctgaaccagaacgttcaggcggcggagatgctggccgaaatggcgatctccagcgcccagcgtcgtctgcgtgcggcgaaaaaagtggtgcgtaaaaagttgaccagcggccctgcgctgccgggcaagctggcagactgtaccgcgcaggatctcaaccgcaccgaactgttcctggtggaaggggactcggcgggcgggtcggccaagcaggcgcgcgatcgtgaatatcaggcgatcatgccgctcaagggtaagatcctgaacacctgggaagtgtcttcagacgaagtgctggcctcgcaggaagtccacgatatctcagttgcgatcggtatcgatccggacagcgacgatctgagccagctgcgctacggcaagatctgcattctcgcggatgcggactccgatggtctgcacatcgccacgctgctgtgcgcgctgtttgtgaagcacttccgtacgctggtgaaaaacggtcacgtctacgtggcgctgccgccgctgtaccgtatcgacctcggcaaagaggtatactatgcgctgacggaagaagagaaagcgggcgtgcttgaacagctgaagcgtaagaagggcaagcctaacgtgcagcgctttaaggggctgggcgagatgaacccgatgcagctgcgcgaaacgacgctggatccgaacacgcgccgtctggtgcagctgacgatcagcgacgaagacgaacagcagaccaacgccatgatggatatgctccttgccaagaaacgttcggaagaccgtcgtaactggctgcaggagaaaggcgatatggcggatattgaggcttgatgccctcaccctaaccctctcccgcagggagagggaatggatcgtaggcccggtaagcgctagcgccaccgggcttttttacatcaaaactccatcttcaccgtaaactgcacttcgcgagggtcgccaatctggttgcccaggttgttggtcgcaatggacgaggtgtagtaggtcttatcaaacaggttcttcacgttgacctgcagcgtcaccggatactgcagcttcatcttataggccgcaaaggcatccgccacaaaatagcccggcagataataatccgcaccgttggtcgctgaacgacggctcacgccgtgcccgccgccgccaattgtcagcgtattcccggcaatcgcattgtgaatatcgtacgtcaggaacagggagccggtgtggcgcggcacgttcggcagcggtttgcccgcgtagtccgggtcttccagcaccttcgcgtcggtgtagccgtagctggcgataatattggtgttctcggtcagcgatccggcaagatccacctccacgccctgggatcgcacgcgtcccgcggttttggcgatggtttcacctcccacgctttcgttgtacagcacgttgcgtttgtggatatcaaacagcgcgatattggcggtaacgccgtcgaacaggtcgaacttcgcgcccagttcgtaggcgttcgaggtttccggcggcaggtcgccaatgtaacttgcaatggacgactgcggcataaacgtctgcgagtagttggcaaacagcgagacggatggcgtgagcttgtaaaccagccccagctttggcgtccactgttcgtcgcggctgtcggtgttgacgttgaacggacgacctttgcccgcgtactgggtgtaatactgatagcgcatcccggcgacggcgatccacttatccgtcaggtacagggcatcctgcgcgtaggccgaataactctcctgcttgagcgtctggtcgctgtctgcggcggagacggttgtacacttgttgagtttgccgtaaaccggatggtagatgttgaaacctttgacgttcttacagcgcatcatgtccgtacgcagcaaatcgtaattctcatacgacacgccggtcaggatctcattgtaaaagcctgcaatatccacattcccctgcagatccgcgcgggtgctgtgcatgcgctgggtcgagccctgggtcgcatccacgcggcgggtcaggttgccggtttttgcatcgtaggccatcacgcgggcctggttatcgctgtatttgtcctggctgtagctgtagtcgaacttcgcggtccactggctgttaagacggtattccgcgttcagctgcgccagatcggactgaccatcggtcacgttaaacggctcgtcaaagcgggttttgcgatcgacatcaacggcttttttagtgttgagatcgaagatcgttccgcgatcgaacggcgttttatagtcgcgatgcgaatagagcacggtcacggtggcatcatcgccgaaccaggtgagcgacggggcgataaaggtgctgcgttcgttgccaaaattacgccagtaatcttcgtcctgatactcacccgtgaggcgatacgccagacgcgtgccgtcgatcgggccggtcacatcgacctgtccggtgccgccgccaaagctggaggaggtggcggacagagaaccaccgaaggttctctccgggcgtttggtgacgacgttaatcaggccgcccggatcgagaatgccatacagcgttgaggccgggcctttaagcacctccacgcgctcggtggcggcgttaaagctgcgcggcaggacggtgcgcaggccgttggtcatgatcgagccgtcccggttcgcgccaaacccgcggcgcacgaaggcatcctgcgtaccgccgagggtattcgtctggaccacgttgctgacgttatagagcgcctcatccagcgtggtggcgtgctgatcctccagcactttatcgctgaccgtattcaccacctgcgggatatccagcatcggcatgttggtcagcgttgcggtggaggtgttcagcggctggtagccgttggtggcttccgccggcgtatttggatcggcagtgacggtaagcgtttcgccgtctttagccgcggtggtgttcgccgcctgggccagcggcgccataaacagcagtgaaaagagcgcgcgcccttttaccccagagagtgaaggtgtgaacgtagccattacatctgttatcccaaaatatccgtgaatcactttcacggaagaatgtgtgagtcattgcccttttatgctctgctcgttagccagaaccggcatcgaacatgtaattgagaatcattcaatcatgcgggaatgtagtagtaaatgaaaaatgataaaaatcggctacatgcatgaaacgcaacgggaaagtacaagggtaattaattatttgattgaaaaataatgatttattgattttgtggcctgcacggtaacgctctgtcacccctggttttttcagggtgtttcttctcttgactactacatggcgtggcgtcaaactctcaaaagagaatgatttttatttatatttgttgcgcttttttattacgttggcgttcacgtggctcacaacacaaaacaaccgggactggttctggagaacctctctgcgggctatcagaaaaaaatcatcgttgatgatatctcccttgccatccctcagcagaaaatgacggtgctggtaggggcgaacggctgtgggaaatccacgctgttgagcactatcgcgcggctgctgcagccgcttgggggaaccgcgctgctggacggtaaagccattcacgagcagccgaccaaagccgtcgcccgccagcttggtattctcccgcagtccccgctgctcccggaagggttaaccgtttttgagctggtctcgcgcggccgctttccctggcaaaacgttatgcgccagtggagcgacgaggacgaactggcggtggaagaggccctgcgcctgaccggcactgcagagtttgcccatatgccggtggaaagcttatccggcggccagcgccagcgctgctggatcgccatggcgctggcgcagcaaacgccgtatatcctgcttgacgagccgacgacgtatctcgatctccgctatcaggtggagatcttggaactgctgcacgccctgacccgccagcatgggcgtaccgtcgtggtggtgctgcacgatctcaactttgccgtgaactacggtgattccctggtctttttacgccagggaaaagtcgagggggtgttacatgaaggcgacgcctgcacgccggagctgatcaaaacggtgtttgatgtggacgtgcatatgtccatcaaccccttgaccggcaaaccgttctttatgccgtttcgccagagccttgaacagccatgatgcgcgcttctctcgccttcctgatgtttacattgctgctggcgctgggcgcgattgtgcatctcggtatcggggcgcggtttatccctccccgaacggtagtggaggcattctttcacttcgaaccgcgcaatttcgaccataacatcatcatcagactacggctgctgcgcctctgcgccgcaatggtgacaggcgccgcgctcggcgtggcgggcgtgctgctgcagtccgtgatccgcaacccgctcggcgagccgcatattctggggctcaacgccggggcagcgctcgcggtggtgatcgccagcgcgcttgggctttcgctgccgtttggtcgcccgctgattgccgccgccggtgccgccgcgctgtttctgctggtgctgatgttctcctcgaccggtcgcaccgggctcacgccgatgaaggtcaccctgtgcggcgtggcgatgtcggcgtttgcctcgtcgattaccgccgcggtgttaatcctggatgaacagacgctactctctctgcgcacctggctggcgggtgatatcgccgggatcaacacgcagatgctccagagcgccctgtgggctgcagccgctggttttgttcttgctatcgggctgtcgccctcgctcaacatgctggcgctgggcgacagaatggcgcaggggcttggcgtgtcgctgctgaaaacccgcctccttgccctgctggccattgcgctgctctgcggcgcggccgtctccctcgccggaccgattggctttatcggccttgtggtgccgcagctcatccgccgtctggtgtcggtcgatttgcgcgtgatggtgccgctgtcggccctgtgcggcgcgctggtgttgctgctggcggatatcgctgcccgcacgctgtttaccccctgggagctggcaaccggcatcatgacggcccttgtcggcgcgcccgtgttcatccttatggcctcgaggatgttcaaatgaaccgggccggactccgcgcgatccgtgttggccgcctgtcggcgctggttcgcccgaaggcgctggcgtacctgtcgcttttcgcgttgatggcgctaggcctgctgggctttggcctgacgcacggttctctgcccatccccgcctctgccatcgggcgggcgctgttttcgcctgaaagtctgacggcggagacgcgctacgtcgtgatggatatccgcctgccgcgcctgctgatggcagtgctgtgcggcgcgatgctcggcatggcgggggcggcgatgcagtccatcacccgcaacggactggctgacccggggcttatcggcgtgaaggagggctgtagcgcggcggtactgttgctgatttttcagttcccggcgctgagcctggcctggcgtccgctgattggcatgaccggcgggctgctcaccgcgctgctggtgatagctctggcgcgcgatatctcgcgcccgcggtttattttgatcggcatcggcgtgtcgtgggcgtttgccgcggcaatgggcgtctttatgaccaccgccgacgtgcgcgacgtgcagacggcgatgctgtggctggcgggcagcctgcacgcggcaaactggacgctggtagggctggccgcgctctgggctgcccccgcgtttgcgctgctgctctttaccgcgcgggcagcggacgtggcgctgctcggcaatcaggccgccgcgggccttggcgtgcgcacaacccggctggcgctgctgcgggttctcgccccggtagtgctgacggcggcctgcgtctcctgcgtgggcagcattggctttgtggggctgattgccccgcatatggcgcgcctgctgctgcgcggtggtcagaccgcgctcctgacgggaagcgccgtgctgggcgcgctgctggtgctgctggcggataacgtcgggcgtctggcattcctcccgctgcagctgccggcgggaattgtcatttcattgattggcggaccgtttttcctgctgctgctctggcagcgccgggacagattttaggggattatgatgcgcgtactgttttcgatgctgttgctggtgggattcgcggtgagcgcggcggagccgacgcagacctttactgacgatctgaaccgaaaggtggtggtgccggtgcacccgaaacggattgtctccttacacgatctggacatcaccattccgctgattgagcttggcgtgccgccggtggcgagccatggccgcacgcggccggacggcagccattttctgcgatccagcggcatgttgaccggcgtcgacttcgataattccgatatcaaatttatcggcacggccgatatcgacattgaagccatcgccgccgccaaacctgacctgatcgttaccgagccgacccgcaacacgccggtggaacaattagcgaaaattgccccgacggtgagcatcgatcatctcgacggcggcgcgccggaaatctaccgcaagctggctcagctgacaggaacgcaggcgcggcttaaggttctggagcggcgatatcaggagcaaatcaaggcgctgaaggcgaccatcgacacgcgcaaaatcaccgtatcggtgattcaggccaatcaggggaaaatcaacgccatgcacagctaccactcgctgggccgcgttctgcgcgacgccggattcaaattcccgccactgattgagtccatcccggacggagggcgcatcgacgtcagcgccgagcgcctgccggagctggatgccgatttcgtcttcgctacctggcgcggggatacgggcggtaaaccgcaggacgagctggcggcaatggaggctgtcatgccgggctggtgtcagttcctgactgcctgccgaaccgggcactacgtgctgatctcgcgtgaagaggcgatctcgaattcgttcgcgtcattagggctgatggccgcgcaggtgcagtcgcagattgccgggcgtccgctgccggaggcctcacggtgatccgcaaagagaaggggcgcgtggatgtctatggcgaccgctttcgcgcgcgggcgcatcagctgacgccgcgtctgctgcaggtcgcacgctatatccatgacaaccgcgaagcggtgatggagcagaccgccatggagattgccgccgtactgaaaacctcggatgccacggtggtccgcgccatacaggcgctggggttcgccgggctgcgcgatctcaagcagacgctggagcagtggtttggcccggtggtcacctccagcgaaaagatgtccaccacggtgaacacgctcgacagcgacgtcaacgcgagcattgatttcgtgctggagggacatcagcacacctgcgaggtgttatccgagccccacaaccgctacgcgatggcgcaggcggtctcactgctggcgcaggcaaggcaggttgccatatttggcattggcgcctccggcattctggccgagtacatcgccaggctgttcagccgtatggggttacccgccacgccgctcaaccgtaccgggatcgggcttgccgaacagctgattgcgcttcagcgcggtgacgtgctggtgatgatggcgcagaaatccgcgcaccgggaagggcaaaccaccctgcgtgaagctaaacgtctgggcattcccaccatcctgctgaccaacgcccttgattcgcgtttcagtaaggaggccagcgtggtgatccacgtcccgcgcggcggtgaaaagggtaaaatcccgctccacggcacggtgctgctctgtctggagatgatcattttgtccgtcgccgccaccgagccgcaacgcaccatcaagtcaatgaagcgcatcaacgaactccatcgcgggttaaagccggggaagaaaagcagctaaaaacaacaaagcccggtggcgctagcgcttaccgggcctacggttcaggttttgtaggccgggtaaacgcagtgccacccggcaaattctacgaacttaaaccccttgctccaggatgcggatgtgggtttccagcacgtcgcccttcaccgcgtcgctccacgctttcatgtgcgcggtctgcagatgcgcttcaagatgcgcgacggtttcccactgctcaaccatgatgatcgagtccggcgcggtcgcctggaagctggcgtcagtgacggcatccaccatcggcgcgtagccgtggcagccttcttctttcagtacggtcgggataattttcgcgaactgatccagcaccgcctggcggtgatgttgacctggacgagtacggatttctgcgataacggtaagcatgtttactactcctttaattccaggctaccagttaagcaaaaatttccgcgagatgcttgcgatattctgcgatatagcgcgggacatcaggcattttaatcacgtcgttgacgataaaggtcggcagcggatccatgcccaggaactgattcgccttgtggaacggcagataagcaccgtctacgcccacgccttcgaagaactgctctttctcggtgaaggcttccagcggtgcgttccaggtcagtgacagcatatattttttgccctgaatcaggccgcctgaaccgtattttttggacgcgtcagagcgggtgcggccatcgctggcatacagcgaaccgtgaccttccgtgaacacgtcgtccatgtattttttcacggtccacggcgcgcccatccaccagcctggcatctgccagatcaccacgtcagcccacaggaagttctgcacttcggctttcacgtcgtagtggctgtctgcacgcacgaccttaacatcatgcccggcgtcgcgcaggaaaccgtccgcgacctcggtcagggtgtcattcagctggcctttagagtgcgcaaattcttttgcaccgttaataatcagaatgttgctcattttttgtcctcgacgatgagagtatgccgggtattctacgcgcgaggacggagcggaaaaatgagcaaaatgtgcaaagtcttttgctggagatgcaataatccgctaccagctgacctttacctcaaagccgccttccgccgcattgcttagcgagacgtgcatcccgtgcagcgcggcaatgcgcctgacgatagaaagccccagcccgctgcccgtggcgttctggcccggtggacgataaaaacgctcgccgatgcgcgccagcacctcggggtcaacgccgggaccgttgtcgcgcacgctaaagctacgcgcgcccagcgtcacgtccaccacgctgccgcgcggactgtagcggatggcgttgtccaacaggttgcgcaccagcaggctgagcagcaggggctgcccctgacgtttgacctgcggggcatggttgttgaggcgaatatcaatccctgcctgctgcgccggatgccagatatccagcaccgccgactgcagtaaatcggcaagcgtgatcggttcgacatcgtcaaggttatccagcgagtccagacgcgacagggtgaggagctgatccaccagccgcgaagcgcggtcgattcccgcatgcagctgtgccagcgctttttcccgcgcctgcggatcgtcctgcgagagctgcgccacgtcagtttgcaccttcagggccgccagcgggctgcgcagctcgtgagccgcatcggaggtaaagcggcgctcgcgggtcatcatctcctgggtacgtgcgaagaggtgattcagcgcgtcgagcagggggcgcacttccgtgggcacaccctgaagcacaagcgcatcggtcgcatccggcgagcgggagcgcagggtctgcgccagctttttgagcggcctcagctcccggctcaagaggagaaccagcaagagcagcatcaccggcagcgccaccagccagggcgtgagctgcgagctgaccacgtccagcgccatatcctggcggtactcccactcctgaccgaccaccacgcggtatttcccgtcgggtgaggtcagccacaggaaacgccattcgtcgttgtcgtcctggagctgcccgttagcaaacccgtcgcggcgatagtggtacggaatatcgcgcccgttctcgccgtcgttcagcagcattttgccctcgacgctgtaaatggcgaaagccagcgcgtcgtcatcgagacggccatgcttcacttttttcgggatctcgcgcatccgctcgggggcgcggatctcgtccagatccatcgtcagcagccgtttggcaaacagcatctgctgcgtgtcgaagagcttatccagcttgtgggtggtctgctgccaggccaccaggctggcggcaaaccatgccgtcagggagagcgctaaaaagaggagcgtcaggcgcagcttcaggctcaggcgttgcgtcagcttcatgcgtcacccagggtatagccgatgccgtgcacggtgcggataaactcgctgccaagcttgcggcgcagatgatgaacgtggacttctaccgcgttgctggagacgtcgtcgtcccaggtatacagtttttcctcaatcgttttgcgagggagcacgcggcctgcattgcgcatcagcagttccagcagcgcgaactctttcggcttcagcgtcagcggttcaccgtccagcgtggcgacgagacgggtcggatcgagcgtgaccttgccgtggcgtagctcgctatgcgtctggccgtggctgcggcggaccagcgcctcgaggcgggcacccacttcaatcagcgcgaacggcttgcagagataatcatccgcgccaagacgcagcccttccacgcgctggttaagcgcatcccgcgcggtcaggatcaataccggctcgctgcgcccgctttcgcgccacgcgcgcaggatgtccagaccgtcgatttccggcagcgtcagatccagcaccacggcatcatagggcgcagaagcgagcgcggcctgaccggttttaccgtcggtaaaccagtccacgctaaagcccattttgcttaaacccgccctgataccgtcgccgattagcgtgtcgtcttctaccagtaaaatgcgcatattccctccttgatgccgtcagtaaaccctctgtaagcgcctgctgtacagcaataataaataaatttttcccttaagaagttgttaaggattaccctgtttaatggactgcgaaaccagattaaagggagagttaatatgaaaaaattcgctgccattgccgccatcatgatgatggccactgcccccgtttttgctgcgcagggcggatttaacggcccgtccgccacgcaaacccagacccaaacgcaggcaggcggttttgtcgataacgacgccaacctcaccaccgcggtgaaggtgaaagagatgaaggacgacagctgggtgaagctgcgcgggaacatcacccagcgcctgtccgatgaccgctacaccttccgcgatgagaccggcacggtgaacgtggaaattgaccacaagcgctggaacggcgtgaccgtcaccccgcaggataaagtggaaatccagggcaaggtcgataaagagtggaacgattttgaaatcgacgtgaagcaggtcattaagctgaacaaataacccgaaaagggccgcataagcggccctttttctttgtgactcaactcgtcagatagggtagtatctgcggcaatattgcctgaaacccttcggtttctgagttgaggaatcacacgtaatgagcgatatggcagagcgcctcgcgctacatgaattcacggaaaacgcctacctgaactactccatgtacgtcatcatggacagggcgttgccgtttatcggggatggcctgaagcccgttcagcgccgcatcgtgtatgcgatgtccgaactggggctgaatgccaccgccaagttcaagaaatccgcccgtaccgtcggtgacgtgctgggtaaataccatccgcacggcgacagcgcctgctatgaagcaatggtgctgatggcgcagccgttctcttaccgttacccgctggtggatggtcaggggaactggggggcgccggacgatccgaaatccttcgcggcgatgcgttataccgagtcccgcctctctaaatatgccgaagtgctgctgggcgagctggggcaggggaccgttgactgggtaccgaacttcgacggcacgctgcaggagccgaagatgctgcctgcgcgtctgccgaacatcctgctgaacggcaccaccgggattgcggtcggtatggcgacggacattccgccgcacaacctgcgtgaagtggcgaaagccgccatcaccctgattgagcagccgaaagcctcgctcgacgatctgctggatatcgtgcagggtccggatttcccgaccgaagccgaaatcatcacctcgcgcgcggaaatccgcaaaatctaccagaacggtcgcggctccgtgcgcatgcgcgcggtgtggaataaagaagacggcgccgtggtgatcaccgcgctgccgcatcaggtttccggtgccaaagtgctggagcagatcgcctcccagatgcgcaataaaaagctgccgatggtggacgacctgcgtgacgaatctgaccacgagaacccgacccgtctggtgatcgtgccgcgttctaaccgcgtggacatggagcaggtgatgaaccacctgttcgccaccaccgatctggaaaaaagctaccgcattaacctgaacatgatcggcctcgacggacgcccggcggtgaaaaacctgctggagatcctcaccgaatggctgacgttccgccgcgatacggtacgccgtcgtctgaaccatcgtctggagaaagtgcttaagcgcctgcatatcctcgaaggtttgctggtggcgttcctcaatatcgacgaggtgattgagatcatccgtaccgaggacgagccgaagcccgccctgatgtcgcgctttggcatcagcgaaacccaggccgaagcgatcctcgagctgaagctgcgccatctcgccagactggaagagatgaagatccgcggcgagcagaacgagctggaaaaagagcgcgatcagctgcaggcgatcctcgcgtccgaacgcaagatgaacaccctgctgaagaaagagctgcagactgatgccgacgcgtttggtgacgaccgtcgttctccgctgcacgagcgcgaagaagcgaaggcgatgaacgagcacgacatgcagccgtccgagccggtgaccattgtcctgtcgcagagcggctgggtgcgcagcgccaaaggccacgatatcgacgcgccggggctcagctacaaagcgggcgacagcttcaaagcggcggtgaaaggcaagagcaaccagccggtggcgtttatcgactccaccggtcgcagctatgccattgacccgatcacgctgccttccgcgcgcgggcagggtgaaccgctgaccggcaagctgacgctgccgccgggcgcgacggttgaccatatgctgatggaagccgatgaccagaagctgctgctggcgtctgacgcgggctacggttttatctgtaccttcaacgatctggtttcccgcaaccgtgccggtaaggcgctgattagcctgccggacaacgctcacgtaatggcaccgctggtgatcgagaacgaaagcgacatgctgctggcgatcaccaccgccggacgtatgctgatgttcccggtcagcgatctgccggagctgtcaaaaggcaagggcaacaagatcatcaacatcccgtcggcggaggccgcgaaaggcgaagatggcctggcgcacctcttcctgctgccgccgcagagcacgctgaccattcacgtcggcaagcgcaaaatcaagcttcgtccggaagaactgcagaaggtggtgggcgagcgcggtcgccgcggctcgctgatgcgcggcctgcagcgtatcgaccgcgtggagattgactctcctgcacgcagcgcggcgggtgacagcgaagagtaatgtcgtgatatccccctctgtccggagggggaatttcaataaaatttcccgtaaaatcgttgttaattcgtgcgttgcgattaacaatacgcgctcgtaataaagtccttacctggccacaggtgaagtataattgtcagctgttagggcttcagaggtcgctatgctatatattgttcgtcttattcttaccgttatctactgtattctggtctgtattttcggctctatttattgcctgttcagcccgcgtaatccgaagcatgtcgccacctttggccatatgttcgggcgtcttgcgccgctgtttggtctgaaagttgaaaaacgcctgccggaaggagcggagaatttcggtaacgccatctatatcgccaaccatcagaacaactacgatatggtgacggcctccaatatcgtgcttccaccgaccgtgacggtgggcaaaaaaagcctgctgtggatcccgttttttggtcagctgtactggcttaccggtaacctgttgattgaccgtaataaccgtgcaaaagcgcacggcaccattgcagaagtggtgaatcattttaaaaagcgcaggatctcaatctggatgttcccggaagggacgcgcagccgcggccgcggcctgctgccgtttaaaaccggtgcgtttcatgccgcaattgcggcaggtgttccaattattcctgtgtgcgtttccaatacttcgaataagattaatcttaaccgcctgaataacgggctggtgattgtcgaaatgctgccacccgtcgataccagcaaatacggtaaagatcaggtgcgcgagctggcagcgcactgccgtgatctgatggctgagcatattgcgctgctcgacaaagaagtcgcagagagagaagccgccggtaagatctaacccggcgttgaagggaaaacgaattcccgcgttgttagtcgtttcagatggagcttatatgtcactcagtcggcgtcagtttattcaggcttcggggatcgccctttgtgcgggtgcgatgccgctgacagccagcgccgccgggcagcaacagccgctgcctattccgccactcattgaatcccgtcgcggccagccgcttttcctgacgctgcagcgcagccactggtcctttacccaggggacgcgtgcgccggtctggggcattaacggacgttaccttgggccgaccatacgcgtgtggaatggcgatgacgtaaagctcatctacagtaaccgtacccctgaaaatgtcgccatgaccatcagcggcctgcaggtccctggcccgctgattggcggcgcggcgcgcatgatgtcgcccagcgccgactgggcgcccgttctgccgattcgccagagcgcggcaaccctgtggtatcacgccaacacccctaaccgcacggcgcagcaggtctataacggcctggccggcatgtggctggtggaagatgaagtcagcaaatccctgccgatcccgaaccactacggcgtggatgacttcccgattatcatccaggacaaacgtctggataatttcggtacgccggaatacagcgaaccggggagcggtggcttcgttggcgatacgctgctggttaacggcgcgcagagcccgtatgtcgaagtgtcccgtggctgggtgcgcctgcgcctgctcaacgcgtctaactcgcgccgctatcagctgcaaatgagcgatggccgtccgctgcacgtgatctccggcgatcagggctttttaccggcaccggtgtccgtcaaacagctcgcgctcgcgccgggtgagcgtcgcgaaattctcattgatatgaccaacggggatgaagtctctgtgacctgcggcgaagcggcaagcattgttgaccgtattcgcgggttctttgaaccgtcgagcattcttgtctcgaccctggtgctgaccctgcgtccaaccggcctgctgccgctggtgaccgatagcctgcccatgcgcctgctgccgcaggagatcatgagcggctccccggtgcgcagccgtgatatcagcctgggcgacgatccgggcatcaacggtgcgctgtgggacgtcaaccgtatcgacatcaccgcgcagcagggcacctgggagcgctggacggtgcgttcagatatgccgcagtcgttccatattgaaggggtaagcttcctgatccgcaacgttaacggcgcgatgccgttcccggaagatcgcggctggaaagataccgtctgggtggacggtcaggttgaactgctcgtctactacggccagccttcgtggccgcacttcccgttcctgttccacagccagacgctggagatgatggacaggggctccgtagggcagatgctgatcaaccccgcgccataaccactgacattcccggttcgccgggaatggtttatgcccgccagaaaaagcgcgagaacagaatcagcaccgggtaaatttccagacgccctaagatcatcgccgcgcacatcaacagcttagccccttctgttaacgtgccgaacgtcgacgccgtctcgccaaatcccagccccatgttgttgatacaggcggcgaccgtcgcgaatgacgtaaacagatcgtagcccatcagattaagcgcccagacaaaaaagcccgtgatcatcacgtagagaaagaagaagctccagaccgagcgcaggacgcgttcattcaccacgcttttgcccaccttaatgctcagcagcgcgcgcggatgcgccagctggttcatctcctgaatactctgcttgaacataatcaaaaaacgcagggctttgatcccgccgcaggtcgagcctacgcagccgccaaaaaagctggcgctcaacagcaggaagatggtgtgggtgggccattgggcgtagtcggcggtcgacaggccattatcggtcatcatcgaactggcaaggaagaaggcgtgcaccaggctatccgtggggctgtacatgcctgcatgccagacctgccaggcggtgatgaggataatcgccgcagcggcgctcaggaagaatttaacctccgggctgcgacgaatcggcttcagggtgcgtcggacaatggcgacgtaccagagggtgaagttaaacgcggagagcagcgaaaacgccccggcaaccagctcgattgcgtggctgtcataaaaaccaatgctctcgctgcgggtggagaagccgcccagtgacacggtcgaaagcccgtgacagacggcgtcaaaaaaggacattcccgccagccagtaggccagagtgcaggccatgcccagcgcgaagtaggtcacccacagcgtgcgcgcggtatcggcaaggcggggcgtcagacgctcctccttgaacggccccggcatctctgactgatagagcttcatgccgccaatgcccagcagcggcaggaccgcgacggccagcacgatgacgcctaacccgccaatgaaattcagctgagcgcggtaatagaggtacgacttaggcagggcgctgacgtccccgatcaccgtcgctccggtagtggtgatcccggaaaccccttcaaagagcgcgtcagcaaaggagagctgaagcccgtcatccatccagagcggcatggcgctgatcaacgaaaacagcagccagaacagcacgataatcacgaaaccgtcgcgggtgcgcagctggatgccggcgtggcgggttgcccgccaggttaagcctccgagactaaaaaaggttaaaaaagtggtcaggaaggcaaagtaggtccgctctttattcagcagggcgataaccatcggcggcagcatggaaaggctgtacagcagcacaaggaaaccgcagaggtgcaggacaacccgcagctgggagacatgtaacgaatcgttgggcttcacaactgagctccgcacaaacacgcattccggggcaaatcaccggaaaatagagtgaatattatgatccaaaattatcagggcggcatattttaacgacttccgtgaatatctgcctgcttcctgcatccttttcttcaaatctggcagatgaacagcgtataatcccgctccttttgtttattttttcttcggaagcattatgagcgcaatttccctgatccagccggatcgtgacctcttctcctggccccagtactgggcggcctgctttggaccggcgccgttcctgccgatgtcccgggaagagatggaccaactgggctgggacagctgcgacatcattctggtcacgggcgatgcctacgttgaccacccgagcttcggcatggccatctgtggccgcatgcttgaggcgcagggcttccgcgtggggatcatctcccagcctgactggaacagcaaagacgactttatgcgtctgggtaaaccgaacctgttcttcggcgtgaccgcgggcaacatggactcgatgatcaaccgctataccgctgaccgtaagctgcgccatgacgacgcctacacgccggataacgtggcgggcaaacgtccggaccgcgcaaccctcgtctacacccagcgctgcaaagaagcctggaaagacgtgccggtgattctgggcggcatcgaggcgagcctgcgccgcaccgcgcactacgactactggtcagataccgtgcgccgctcggtgctggtggattccaaggccgacatgctgatttacggaaacggcgagcgtccgctggtggaagtggcgcaccgcctgtcgcaaggcgagccggtgagcagcatccgcgacgtgcgcaatactgcgatcatggtgaaagaggcgctgccgggctggcgcggggtagattccagcatcatcgatatgccgggcaaaatcgacccgatcccacatccgtacggcgacgatctgccgtgtgccgataacaaaccggtagagccaaagaaggcggaagcgaaggcgatcgtcgtgcagccgccgcgtccgaagccttgggaaaagacctacgtactgctgccctcctacgagaaggtgaaagccgacaaggtgctctacgcgcacgcgtcccgtattctgcaccatgaaaccaacccgggctgcgcccgcgcgctgatgcagaagcacggcgagcgctttatctggatcaacccgccagcgatcccgctctccaccgaagagatggacagcgtctttgcgctgccgtacaagcgcgtgccgcacccggcgtacggcaacgcccgcatcccggcgtatgagatgatccgcttctcgatcaacatcatgcgcggctgcttcggtggctgttcctttactcttgtttttatgtatttagagttaaactctacttttctatttttagaattcaagctattcatcgtaattgagagatatccttttaatgttcagcaagcctgttaaaagcactttatctgaaccgcgttttgcctaaatcctgctcaatatatactctccctgagttctgaaatcctcaaattccccaatcttaaagcattgatacatagatgatgtcagataatgcgcaatcatctcaccgccaatatggatccgttccgggtgtgggtatgtcgcctgtatagccctttgttcattcatcattacaggaattgtctgcaacaaatccccatccaagatttggcactcaggttttactcctgttccgtattgtaattgctctgattcgaaatcatggactgagcgataggcgaacgaaacgatatttcctgtttcctcgcaaattgcgaactgataaacactggttgtcaccgttgaagaagagggaattgcatggtcatgcttgtattgtttccacagcctccttagacaggccgatgtatgataattgagattttgtatacctgatacgaccattctggttgatgcttcaagcaaccaggtgttagaaaatccacctgcccccgttcctgctatgatggttcttagctgggggatgtaacctgctttggaaacaaaagataacggctccccattatcggtgacggcaagggtatctgttacaatcagtgcttgtgcttcgtctgtataaaatatcagtgatgacatattttcctcatccagaaaagacattacatgaatcacagaacaggtcactacaaccacgtgaaagggagtcagaccattttccagaggtaaatatattcttgtgtttggacgcgttgcggttctctgtaaaaaatatatagcacaaacaaaagtccccgcagggataaatatagttatatgcgctttttctgctggcttttacaattgaaagtgacaggtaaacgaaatgtgttacaggtttcttttgcttttcgttgggttctgtatatgcgaatttaccctgtgtgttatttttgcaatggactcaggctgtattcaatcaattaaggtttacttctggcattaagatgtatccgttgcctgttttttaagggcacggtttgtgccgggaaatgaaaatcacatcttaagttcttcactcaaaggatttgtgatgtttatcacgtatggtccgggtaacgtgttgaggtcaatgtattgcatcgtgatggtgtcgttacatcttttactttcctcctgatttgcatattcactcccggcaacctggttgtttgttttttcttcttccggatttatagtgtaggcatgaggtggcgtttcagggcgacagactgtgaggataatcactaacattcatgcgcgttatgggcgtgtcagcaaactggatgcaacagagccgaaactgaaatttgaacccggatttctgtatgctgaaataccttatattagcggcatccagaatcgaaaactgagccgatatgtacacttttatcttatggataaagctatcctgcaggccagggatttaaagcctttagcccgggcatttttacgctggataaggtggctggaggataacggacttgaccctttcaccccgggaacgttgaaataccaaagccctacatatggcttcagggagtatcttctgggggccgtaaggcaggggcgcatcgcctcatccaccgcggcggtgtacatcagcgttatccgacggttttacgtatttctgggcaagtgtggtgagctggctgccagctcattttttacgttggtcgaaaaagtcgttgacgggcgacgcaaggtgataagttcggatcttgccatcaggataaccagcacaacaaaaaggacaatcaacccactgaatgatgcagaggttcatatcctggatgaggcactgaaatctgagtccgggttgttcagtttaatgattgtgctgatgaaaaattgtgggctacggctggatgaaatgctgaccctgccgtcgtcactctttactgaagagtaccttgccagtgtccctgtatctgagttgaccatcagggggcttcatattggtccgagatgcggagttcatacgaagtttgggatgacgcgagaactcttcatcaccagacgattgtacgagcaggttctggattatctggcggatgaggagtatgaaaagaagatccaaaaatggcgtgcacgacagggtggggaagggcggcacgagcctttatttttaatggcaaacgggaaacggatgtctgaaaaagccttttactcccgctggtacagttttcgccatcgcctggcccggtctgctccgggaaatgtgttcagacataaaccccatgatttgcgggcaacgtttgcgacccattttttacgctcggcactgagttgctatcccgatcaggccgcaaatgcgctgggtacagtaaaatactggatgggccataaaagcgaaaatacgacgatgaaatacatcgtctttcttcagcaaaaccagatttctgatgcagtcgccggggtcatggacgcattgattgacggtgctgcaggtcgcgatggagccatatatgagccggagtgaaacgcagataacgtggatggccgaaaatgtgctgtcatgggagacggtcagcggacacatcactcagcgggatctgaaccgatattatttacttgacgtttatcttcaggctcatttttcagattatgtgttgctccccggatggtttagtgaacattcgcatcttgcccgccctgaaaaacgcgattttattgcctctctgaaacgatttcttctgtcttaccgtcccgccggaaggttaaccattttccgttatctcaatatgttttttatatggcagtcagtcaatcagtatgactatggcacggctgaaggcgttgaaatgtatattaaacatctcatgaacgatattcgtcggcgaaaaatttcagtcaggatggcaagacactacttgtccgtggtcaaccggtttttgcttacgggcgggcagattcagaggcggtatgaatatgaattcttaccgaaaggaacgtatcagcagcagggaagggatagctataccaggaatgaactttccgagatcctgaggcagttgtcatccatgaatgagttccttgcgggatgtatccgggagcatatcgctaaatcggaaaaaggggtgcggcatttctcaccgtctttgctggcacctgtttatgaagcgtatttccggtatccgggagagaacggggtcagcagggcagagatcatcatcagggacgttctggaaaattactttcttacttctttttttctgttctgttaccacacatggggaaacacctctcaggttctgggtctgacgcgggatgatatacatctggatgaaaagggtatcagcactgattatgtttataaggggagagcgaataagtatatacgtctgacgataggtaaatcggagtatgtgaccaaacgtgcgggctattactggtttctgtcttttatcaggctcagggacgacatcgttaactatctggtttccgcagataacttccctccggtacaggcgctgtttctgagtgagccgcaggtgaaattccgtaagctttattctcttaatcccagtcatctgactaaattttctaactctgagggggcgtgggccacgatgcggcagcttaatccctcgcttccatcaattaccgtttctggcttgcgcaaaacgtctgagcagtatacggacagaacattaaagaatggtctgattacggcggaaaaagcacagcataactggggcacttacaggcggaattatgctgcaggtaacccacagggggctgtcaacctgttgatgactattttaatctgtagtcattcaatccttgtaacatcaggatgatcctggtgtcagtgaaaatacgaaatcaacacgttggtatcattaccttcgaaagctaataataaaaacgggaaccaatcggctcccgttacgatttaatctaacatcatgattacatattcgcgataatcgcgtcgccaaactctgagcatttcaacagcttagcgccttccatcagacgttcgaagtcataggttacggttttcgcgttgatcgcgccttccatacctttgacgatcaggtctgcggcttcgaaccactccatatgacgcagcatcatctctgcggacaggatgatagagcccgggttcactttgtcctggcctgcgtattttggtgcagtaccgtgggttgcttcgaacagggcgcactcgtcaccgatgttcgcgccaggggcgataccgataccgccaacctgagctgccagggcgtcagagatgtagtcaccgttcaggttcatacaggcaatcacgtcgtattccgctggacgcagcaggatctgctgcaggaacgcatcggcgatcacatctttaatgatgatctctttgccggtgttcgggtttttgatcttctgccatgggccgccgtcgatcagctcaccgccgaactcttctttcgccaactggtagccccagtctttgaacgcgccttcggtgaacttcatgatgttgcctttgtgaaccagggtcacagagtcacggtcgttggtgatcgcatattcgatggccgcgcgcaccagacgcttggtcccttcttcggagcacggcttaatgccgataccgcaatgctcagggaagcgaattttcttcacgcccatctcttcgcgcaggaatttaatcactttctctgcatcagcagagtccgctttccattcgatacccgcgtagatgtcttctgagttttcgcggaagatgaccatatcggtcagttctgggtgcttaaccgggcttggggtgccctgatagtaacgaaccggacgcagacagacgtacaggtccagctcctgacgcagtgccacgttcagggaacggataccgccgccaactggcgtcgtcagtgggcctttgatagcaacgcggtagtcgcggatcaggtccagcgtttctgctggcagccagacgtcctggccataaacttgcgtcgatttctcaccggtgtaaatttccatccaggaaattttacgctcgcctttgtaggctttctcaacagcggcatcaaccactttcagcattgccggggtaacgtctacaccgataccatcaccttcgatgaatggaatgatcggattgtgaggaacgttaatcttgccgttttgcagggtgatctttttaccttccgccggaacaactactttgctttccattaacctctccttcgagcgcttctggttgttactgatcttatgttaataaattgtaatgagcccttcgatagtacctgattgtccgacgccatgaaaggtcttcgttattaggctataatgcggcaattgataacgcctgaaaataccatgaagaaaacttcttttacaaaacaccgggttgagcgattcagctcgcgacaagccgccagacgaccgcaagaaacccagccaaagcgggtgattctgttcaataaaccctacgatgttttgccgcagttcaccgacgaagccgggcgcagcacgcttaaggactacatcccggttcagggggtctacgcggccgggcgtctggaccgcgacagcgaaggcctgctggtcttgaccaacgacggcgcgctgcaggcgaagctcacgcagccggggaaacgcaccggcaaaatttacttcgtccaggtagaaggcgagccggatgacgagacgctggaaaaattgcgcaaaggcgtcacgctaaacgacggtcccaccctgccggcaggtattgaacgcgtgaatgaaccggagtggctgtggccgcgtaacccgcctatccgcgaacgcaaatccattccgacaagctggcttaaaatcaccctttatgaaggccgcaaccgccaggttcggcgcatgaccgcacacgtcggcttccccaccctgcgcctgattcgttatgccatgggtaactacacgctggaaacgatggcaaacggtgaatggcgggacgttacctcttaaggagtcactatgttaaaacctcatgtcacggttgcctgcgtggtccacgcccaggggaaattccttgttgtcgaagagagcattaacggcaaagcgctgtggaatcagcctgccgggcaccttgaagccaatgagaccctcctgcaggcggcaaaacgcgagctgtgggaagagaccggtattcacgccgagccccagcacttcatccgtatgcaccagtggattgcgcccgacagcacaccgttcctgcgttttttatttgccgttgagcttagcgaaacgtgcgccactgaaccgcaggataacgatatcgaccgctgcctgtgggtcaccgccgacgagatcctgaacgcgccaaacctgcgctcgccgctggttgcggaaagcattcgctgctggcagtcaggcgcacgcctgccgctggatgtcatcggcgcatttaactggccgtttacagagggtgccaatggtgggggggcgtgatagaatacgccgccttgaagttcaatgtcgtgagtattccatgtcagataacagccagaaaaaagtgatcgtcggcatgtccggcggtgtcgattcctccgtttccgcctacctgttacagcaacagggctataaggtggagggcctgttcatgaagaactgggaggaagatgacggcgaggaatactgcactgccgcagcggatctcgccgatgcgcaggccgtgtgcgataagctcggcattgaactgcacaccgttaactttgccgcagaatactgggacaacgtatttgaactgttccttgaagagtacaaagcgggccgtacgccgaacccggatattctgtgcaacaaagagatcaaatttaaggccttcctggaattcgccgcggaagatctgggcgcagactacattgcgaccggtcactacgtgcgtcgcgcagacgtgaatggtaaaagccagctgctgcgcggtctggacggcaacaaagatcaaagctatttcctctatacgctgagccacgagcaaatcgcccagagcctgttcccggtcggcgagctggaaaagccgcaggtgcgtaaaattgccgaagagctggacctcatcaccgcgaagaaaaaagactctaccggcatctgcttcatcggcgagcgcaaattccgcgatttcctcggacgttacctgcccgcacagccgggtaaaattgtcaccgtcgacggggaagagattggccagcatcaggggctgatgtaccacaccttaggccagcgtaaaggcctgggtatcggcgggacgaaagaaggtagcgaagatccgtggtacgtggtcgacaaagatgtcgaaaacaatattctggttgttgctcagggccatgaccatccgcgtctgatgtccgttggcctgatcgcgcagcagctgcactgggtcgatcgtgagccgctgaaaggcacgctgcgctgcacggtgaaaacacgctaccgtcagaccgatattccttgcaccgttaccgcgcttgatgacgaccgcattgacgtgcgcttcgacgagccggtcgccgccgtcaccccgggtcagtccgctgtcttctacagcggcgaaatctgcctgggcggcgggatcattgaacagcgcctgccgctgcccgctgtttaacagcgtttgcacacataaaggagaccgtgtggcgaagaactactatgacatcaccctggcgctggcgggaatttgccagtcagcccgtctggtgcaacagctggcgcatcagggtcattgcgacgctgatgccctgcacgtttcactcaatagcgttatcgacctcaaccccggttcgaccctgggcgtgttcggtggcagtgaaaccaatcttcgtctcggtcttgaaaccctgcttggcgtgcttaacgccagcagccgtcaggggttaaacgcagagctgacccgctacacgttgagcctgatggtgctggagcgtaagctgagcgcagcaaaaggcgcgcttaataccctgggcgatcgcattgccgggttacagcgtcagcttgaccattttgacctgcagtccgacacgctgctgagcgccatggtcggcatttatgttgacgtcatcagcccgctgggcccacggattcaggtcaccggctcccctgccgtgctgcaaagcccgcaggtacaggcaaaagtacgcgcctccctgctggcagggatccgtgccgccgtactgtggcaccaggttggcggtggccgcctgcagttaatgttttctcgtaatcgcctgaccactcaggcaaaacaaattcttgctcattgttaacctcccggagttgcgaattatggaattatcctcactgaccgccgtatcccctgtcgatggacgctacggcgataaagtcagcgcgctgcgcgggatcttcagcgaatatggtttgctgaagttccgtgttcaggttgaagtacgctggctgcaaaagctggccgcccaggcagcaatcaaggaagttcctgcttttgacgaaaaggcaaacgattaccttgataaaatcgttgccgagtttagcgaacaagacgccgcgcgcattaaaaccattgagcgcaccaccaaccacgacgtgaaggcggttgagtacttcctgaaggagaaagtggaaagcgttcctgcgctgcacgccgtgtctgagttcatccacttcgcctgtacgtctgaagacatcaacaacctctctcatgcgctgatgctctccaccgcgcgcaaagaggtggtgctgccttactggcgtaaaatcatcgacgcggtgaaagcgctgtccgtggaataccgcgacattccgctgctctcccgtacccacggccagccagccaccccatccacgatgggtaaagagatggcgaacgtcgcgtaccgtatggagcgccagtaccgtcagctggaacaggttgaaattctgggcaaaatcaacggcgcggtcggtaactataacgcccacatcgccgcgtatccggaagtggactggcaccagttcagcgaagagttcgtgacctcgctgggcattcagtggaacccgtacaccacccagattgagccgcacgactatattgcggagctgtttgactgcatcgcgcgcttcaacaccatcctgattgacttcgatcgtgacgtgtggggctacatcgccctgaaccacttcaaacagaaaaccatcgccggtgaaatcggctcttccaccatgccgcacaaagtgaacccgatcgacttcgaaaactccgaaggtaacctgggtctggcgaacgctgtgctgcagcatatggcgagcaaactgccggtatcccgctggcagcgcgacctgaccgactccaccgtactgcgtaacctgggcgtgggcatcggctacgcgctgatcgcgtatcagtccacgctgaaaggcgtgagcaagctggaagtgaaccgtgaccgtctgctggatgaactggatcacaactgggaagtgctggcggagccgattcagaccgtgatgcgtcgttacggcatcgaaaaaccgtacgagaagctgaaagagctgacccgcggcaaacgcgttgatgccgaaggtatgaagcagtttatcgacggcctggcgctgccggaagaagagaaaacccgcctgaaggcgatgacaccggcgaactatattggccgcgccatcaccatggttgacgagctgaagtaatctcctctcccccctttccgcccggaaagggggttgcttttccccggtttactcaatgtttatccccacagcaacataatcagcgttaaactattcatactatttattctgggagaaaagatgatgcgcgtactggttgttgaggataacgcattgctacgccatcacctgaaggttcagcttcaggagatgggacatcaggtggacgatgctgaagatgcaaaagaagccgattattatctcaatgaacacctgccggatatcgccattgtcgatttagggttgcctgacgaagacggcctgtcgttgattcgccgctggcgcagccacgatgtttccctgccggttctggtgctgaccgctcgtgaaggctggcaagataaggttgaagtgctcagcgcgggtgcagatgattacgtcactaagccgttccatattgaagaggtggcggcccgcatgcaggcgctgctccgtcgcaacagcgggctggcgtcgcaggttatttctatcccgcctttccaggtcgatctctcccgccgcgagctctcaattaacgatgaagtcatcaagctgaccgcattcgaatatacgattatggaaacgctgatccgcaacagcggcaaggtggtgagtaaagattctttaatgcttcagctctaccctgacgctgaactgcgcgagagccataccattgacgtgctgatgggacgactgcgtaagaaaattcaggcccagcacccgcaggatgtgattaccaccgtccgcggtcagggctacctgtttgaattacgctaaatgagacggattttgcgtcatcttctgcccctctcactgcgggttcgttttttactggcaacggctgcggtggtgctggtgctgtcgctctcctacggcatggtcgccctggtggggtacagcgtcagcttcgataaaacgacctttcgtctcttacgcggcgaaagcaatctgttttataccctggcgaaatgggaagataaccgaatcaccgtcgaaatgccggaaaaccttaatcagcaaagccccaccctggccctgatttacaacgaaaaggggaagctgctgtgggcgcagcgcgatattccgtggctggtcaaaagcattcgtccggagtggcttaaaaccaacgggtttcacgaaattgaagccgatctcaacaccaccagctcgctgatccgtgaagatcgttccctgcagcaaaagctgaacgagatccgcgccgacgacgccgaaacggagatgacgcactccgttgcgatcaacctttatccggcgacgctaaacatgccgcagctgaccatcgtggtgatcgacaccattccggtcgagctgaagcgttcttatatggtctggagctggttcatctacgttctggcggcaaatctgctgctggtgatcccgctgctgtggatagcggcgtggtggagcctgcgccccattgaatcactggcgaaagaggttcgcgaactggaagaacatcatcgcgaaaagcttaatccggaaaccacccgcgagctcaccagcctggtgcgtaacctcaaccgcctgctgaaaagtgaacgcgaacgctatgataaataccgtacgacgcttaccgatctgacccacagcctgaaaaccccgctcgcggtgatgcaaagcaccctgcgttccatgcgcagttcgaagctgagcgtcgacgatgccgagccggtgatgctggagcagatcagccgtatttcccagcaaattggctattacctccaccgcgccagcatgcgttccggtagcgccctgctgagccgcgagctgcatccggtcgccccgcttctggataacctcacgtccgccctcaacaaggtgtatcagcgtaaaggggtgaatatcagcctcgatatctcgccagagataagctttgtgggtgaaaaaaatgacttcatggaagtgatgggcaacctgctggataacgcctgcaaatactgtctggagttcgtggaagtgtcggcgcgccagacggataacgaactgcatatcatcgtggaggatgatggcccggggatcccgcgcaataaacgtgatgtggtgttcgatcgcggtcaacgcgccgatacgctacgtcctggccagggcgttggattagccgtcgcccgggagattgtcgaccagtacgacgggaaaatcgaaaccagcgaaagtttgctgggcggcgcgcgaatggaggtcatttttggtcgccagcagcccacatcgaacgatagttaacccgttatgtgaaaaatgcgaggatctcgcagccggggggctgagcttccgttataatccgaatcagtaagagcctgcggaataaaaaaatatggattatcacttaacgcttaactggcccgagtttattgaacgttactggcaaaaacgcccggtcgttctgaaacgcgggttcagcaattttgtcgaccctatctcgcctgacgagctggccggtctggccatggaaaacgaagtcgacagccgcctggtcagccaccaggacgggaaatggcaggttagccacggtcctttcgaaagctacgatcatctcggtgaaaacaactggtcgctgctggtacaggctgtcaaccactggcatgagccgacggccgcattaatgcgtccgttccgcgccctgcccgactggcgcatggacgatctgatgatctccttctccgtgccgggcggcggcgtaggcccgcatctggaccagtacgatgtgttcatcattcagggtacgggccgccgccgctggcgcgtgggcgaaaaagtgccgatgaagcagcactgcccgcatccggacctgcttcaggttgatccctttgaagggattatcgacgaagagctggagccgggcgacattctctacatcccgccgggattccctcatgaaggctactccctggagaactccctcaactactccgtcgggttccgcgcgccaagcggccgcgagatgatcagcggatttgccgactatgttctgcagcgcgagctgggcagctatcgttacagcgatcccgacgtgcctgcgcgtgagcacccggcagacatcctgcctgcggagctggataagctgcgcggcatgatgctggatctgatcaacgagccggaacatttccgtcagtggtttggcgagtttattagccagtcccgccacgagctggacgttgcgcctccggagccgccgtatcaggcggacgagatttacgatgcgcttcagcaaggcgacaagctgacgcgcctgggcgggttgcgcgtgctgcgcattggtgaggacgtgttcgtcaacggcgagaagctggactcaccgcaccgaccggcgctggaagcgattgccagccatctggtgctaactgctgatacctttggcgatgcgctggaagacccgtccttcctcgcgatgctggccgcgctggtcaacagcgggtactggttctttgaggactgagtcgctttagtgcccggtggcgctgcgcttaccgggcctacgggatcgagcttttgtaggccgggtaaggcgtagccgccacccggcttttcacttccgctcccccgcggcaaaatcctcaatctctcctgcccaatccaccggatacaacccttgagccacgtcccgatgaaacgttgaatacggccagtcgctgactttacccacatagccgtgcttcagcggattgatataaatgtaatccacatgccgccggtagtcctcttcgttgcggatggtgtgctcccagaatcgtggctgccagatatagcgcatgtcgatgctgcggctgaatgtctttttgatatcccgccagcgggcggaaaaatcactgtccccgtccggtagggtccagatacagtgcatatgttcaggcaaaataacccacgcgttgatggtgaagggcttcgcacgcttaaccgttgaggtggcggaacgcaggctatcgatatggcgggtaagcaaatcgctctgacggttttgcaggttaacggtgaaaaaccaggtgccaccggggacgtaatggcgacggtagtttgacatgggcactccttgcctttctgcccggtggcgctgcgcttaccgggcctacaatttgaacgtaggccgggtaaggcgtagccgccacccggcttaaagcgactaccgcttcgcagtcaactccgcgatccgcactatcaccttgaccgccttttccatcccttccagcgtcacaaactcatgtttaccgtggtagttatagccaccggtaaacaggttcgggcacggtagtcccataaacgacagctgagaaccgtcggtaccgccgcgaatcggttttaataccggttcaatatcgcagtcgcgcatcgcctgctgggcgatatcgagaatatgcggatgggccatcaccttctcgcgcatattgtaatagctgtcttcgatgatgagctcgatatagcagtcaggatgcaggcccttgcccaccttcttggcgatctccatcatcttgcgcttgcgcgcctcaaaggctttacggtcaaaatcgcggatgatgtagtgcatctgcgcgctgtccacggtgcctttgatgctggtcaggtgatagaaaccttcatacccttcggtctgttcggggctctcttccgccgggacttctgcatgaatacgcgacgccagcgacagcgcgttgaccatgacgcctttggcagagcctgggtgaacgttgttcccgacaattttgatggtgactgacgcggcattgaagttttcatattccagctcaccgacgccgccaccgtcaacggtataggcccactgcgcgttgaatgcgtccacgtcgaagtgcttcgcgcccttgccgacctcttcatccggcgtaaaggccacgcggatatcgccgtgcggaatatcgttgcccttcagcaccgccagcgccgtcatgatctccgcgatgcccgctttgtcatccgcccccagcagcgttttaccatcggcggtgatcagcgtctgaccgagcagctggtgcagcaccgggaacatcacgggcgagagcacttcgtcgccaatgcccagcgcaatgtcgccgccgcggtagttttcaacaatctgcgggttcacatgtttaccgctaaaatccggagaggtgtcgacatgggagataaagccaatcgccgggatatccccgtcgacattcgccggcagcgttcccatcacagtgcctttctcgcttaacgtgacgttgaccagccccatggcgtcaagctgctctttaagcaggtttaatagcttccactggccttcggtgctcggcacctggcgaacacccggcttagattgggtatccagcgaaacgtactgtaaaaaacgctcaagtaatttatccatgcagtcaccctcactttttgtgacaacattatcaataagcatcaaaacgcaaatattgcgtcaggtcacttttatcccgcaaacgagaatattttccgtttatatcgttgtgcgttagtaaatgtagcttatgaatcagtgacaaggattggcgattgcgggggattgccgtagaatgtccgccctcattacgagtcaccaaggtggttacacacaaaccccgcttcagtctgctgcctgaggcgtctatatgggacagcgcaaaaattgaatacacaatcccgttcacgttcaccgctggtgcaactggaacgaattcgtaaaagttttgatggcaaagacgtcatttccgacctcactctcaccatcaatgacggtgagtttctgacgctgcttggcccctccggctgcggcaaaaccaccgtactgcgccttatcgccgggctggagagcgtcgataacggccatatccatcttgaaaaccaggacatcacccaggttcccgctgaagaccgccacgtcaacactgtctttcagagctatgccctcttcccgcacatgaccgtgtttgaaaacgtggcgtttggcctgcggatgcaaaaaaccccggcgaatgaaatcgaaccgcgcgtcaccgaagccctgcgcatggtgcagctcgagacgtttgcccagcgaaaaccgcatcagctttccggcggccagcagcagcgcgtggccatcgcccgcgccgtggtcaacaagccgcgtctgctcctgctggatgaatccctctccgcgctggattacaagctgcgcaagcagatgcagaacgagcttaaagccctgcagcgcaagctcggcattacctttgtcttcgtcacccacgaccaggaagaagccctgaccatgtccgaccgcatcgtggtgatgcgcgacggcaaaatcgagcaggacggcacgccgcgtgaaatctacgaagagccgaaaaatctctttgtcgccagcttcattggtgagatcaatatcttcgacgccacggtgatcgagcgtctggatgaccagcgcgttcgcgcgtgcgtcgaaggacgcgagtgcgtcatcacggtgaatttccccgtcgaaaagggacaaaagctcaacgttctgctgcgcccggaagatctgcgcgtcgatgaaattcacggcaataccgaggccgaagggttaatcggctatatccgcgagcgcaactacaaaggaatgacgctggagtctgtcgtcgagctggagaacggcaaaatggtgatggtcagcgagttctttaacgaggacgacccggacttcgaccactctctcgaccagaaaatggttatcaactgggtagaaagctgggaggttgtactggctgatgaagaacacaagtaagttccagaatgtggtgattgccacgatcgtcggttggcttgtgttgtttgtctttttacccaacctgatgatcatcgccaccagcttcctgacccgtgacgacgcaaacttcgtttcgctggtttttacgctggacaactacgcgcgcctgctcgatccgctctattttgacgtgctgctgcattcgctcaatatggcgctgattgccaccattgcctgcctggtgctgggttatccgttcgcatggttcctcgcgggtctgccgcaaaaggtgcgtccgctgctgttgtttctgctgattgtgccgttctggaccaactcgctgattcgcatctacgggctgaaaatcttcctcagcaccaaaggctacctcaatgaatttctgctgtggctgggggtgattgatacgccgatccgcatcatgtttaccccgagcgcggtgattgtgggtctggtctatatcctgctgccgtttatggtgatgccgctctactccagcattgagaagctggataaaccgctgctggaagcggcaaaagatctgggtgccagcaagttccagacctttatccgcattatcattccgctgaccatgcccggcattatcgcgggctgtctgctggtcatgcttccggccatgggtctgttctacgtttcggacctgatgggtggcgcgaaaaacctgctgattgggaatgtgatcaagagtcagttcctcaacattcgcgactggccgttcggctccgccaccagcattacgttgacggtggtgatgggtctgatgctgctggtttactggcgcgcctcacggctgctgaacaagaaggtggaactcgaatgatcggtcgactgcttcgcggcggtttcatgaccgccatttacgcttacctgtatatcccgatcattattttgatcgtgaactcgtttaacagctcgcgctttgggattaactggcagggctttaccaccgactggtacagcctgctgatgaacaatgacagcctgctgcaggccgcgcagcactcgctgacgatggcgatcttctccgccaccttcgccacgctgattggatccctgaccgccgtggcgctctaccgctatcgctttcgcggtaagccgttcgtcagcggcatgctgtttgtggtgatgatgtcgccggatatcgtgatggcgatttcgctgctggtgctgtttatgctgctgggcgtacagcttggcttctggtcgctgctgttttcccatatcaccttctgcctgccgtttgtggtggtgaccgtctttgcacgcctgaaagggttcgacgtgcgcatgctggaggcggcgaaagatctgggcgccagcgagatgaccatcctgcgcaaaatcatcctgccgctggcgatgcccgccgtggcggccggatggctgctgagctttaccctgtcgatggatgacgtggtggtctcctccttcgtgaccgggccgagctatgaaattctgccgttgaaaatttattcgatggtgaaagtcggcgtttcacctgaggtgaacgcgctggcgaccattctgctggtgttttcgctggttctggtgatcgccagccaggttattgctcgtgataaaacaaaatctcaggggacaatgaaatgaaaaaaatgctcgccgctgcggcgctggtgcttggtatgggtgccgcacacgctgatgacagcaaaacgctctacttctacaactggaccgagtacgtgccgccgggcctgctggagcagttcaccaaggagacgggcatcaaggtgatctactcgacctacgagtcgaatgaaaccatgtacgccaagctcaaatcctacaaagatggcgcgtacgatctggtggttccgtccacctactttgtcgacaaaatgcgcaaagaaggcatgatccagaagatcgacaaaacgaagctaacccatttttcaaacctcgatcctgagatgctcaacaagccgtttgacccaaataacgactactccattccgtatatctggggggcaaccgcgattggcgttaacagcgaggccgtcgatccgaaatcggtgacaagctgggccgatctgtggaaaccgcaatacaaaggcagcctgctgttgaccgacgacgcgcgcgaagtcttccaggtggcgctgcgcaagcttggctactctggcaacacgacggatcctaaagagattgaagcggcatatgccgagctgaaaaagctgatgcctaacgtggcggcattcaactctgataacccggcaaacccgtatatggaaggcgaagtaaacctggggatggtgtggaacggctccgcgtatgtggcccgccaggccggtacgccgcttgaggtagtctggccaaaagaaggcgggatcttctggatggacagcctctccattccggctaacgcgaaaaatgtggatggggcgctgaagctgattaacttcctgctgcgcccggacgtggcgaaacaggttgccgagacgattggctacccgacgccaaacctggccgcacgcaagctgctgaagcctgaagtggctaacgataagtcgctctacccggatgcggaaaccatcagcaaaggtgagtggcagaacgatgtcggcgacgccagccgcctctatgaagagtattaccagaagttaaaagcgggccgctaaccggtatcgcgctcttcctcacgccgcctgcgcggcgtgaggaaggattaactgaccgtattctctccagcccagagcgtcgcctttcgcatcgcctcaaccacctcttcatctgacaggcccagcgcctgacgaacccgggtcgcctcgtcccaccgctgctgttcatagtaacggcagaggttaatcatgtcggctaaccgtccctcctggtggcacagcgcgttgctcacgctctgcggtaccgcaatttgcttcatcagctctgccatcggaagctccaggagggtatcgagcagagaaaacaggccgcacatgaacgcattttcagccagagtaggttcgttcatcgtctcagccagcagttcgcagaatttgccgcgcatcatgctcagcgggtaaagctcgctgacggtgtcattgcccgcactggcgaggaccacgacggcaacaaaccgtcggagctggttttcgccaagatacctgagcacctcgctcagggttaacttgctgaaattacaggcgccgacatgtttaaacgccgtatgcttcatatagcgcatgattttataagagagcgtgagatcggtttttatcaacgactcgatgattcgaaaatcaggtttattgcgtccgacctccatttgcagccgaaaaatcgccagctgattttgcgacagccgtttatatttaatgacctccggacggcagaaaaaatagccctgaaaaagggaaaatccctcgtctctgtattggttgaattcctctttagtctcaattttttcagcaagatatttaatatgaccggtcagatgtttacgtactttcagatactctttaatttgcgctaaggtataatttctgacgtcgaatttcaggattgaaatatagggtaaaaaaacatcccattctggcgcaagggtgaaatcatcaagcgcaaactgataaccgtgcgcattcatctccctgacggcctgcagcagttcagcccccggcacagcatcttcaaggatttcaatcaccacgctctctttatcaagcgcttctccactgcggtcaataaccatccttgaagggaaattaataaacgacgtatgtgccccggcaatgcgctgggacggcacacataagaactgatctgatatcatcctggacgtggcatattctgccgacacatccggaaaacgatttgtcatcccgtctctgaaaagcagctcataggctacggtattcatttcagggttaaaaatgggttgtcgcgcgataaatccgtacatatcccatcctcctctaccactttatatttattagcatcctctttctacacgacgataacgagttttatcgagcactattttgattgaatgcacaaaataaaagcatccacactaattaacgggaattaaccgtctggatttaaattaaatatatccttcgctctacagaaaggggatgaaatatccgataagtactttgtgcctgcccgacatgcacgacattacgggagatgagaatgaaagacgccatggtccgaagacaaaaaataagagtcaagacgttgatgctattgtccattttcctcaccgtgacggtgggctttacggcaacgatcgggtttatgatgtggcaatggatggcgcagcaagaggtgctggccaaaaaccatatccgccagatagccgaggtacacgctttacaggtcagcaaacagctggattctgccctgactgccgcccgggatatgggcaacagcgccctcgcgctgcgcgaagcgggcatttccgaccgccagagcctgaaccagctgctcgtccactacctctcggctcacccgtcgtttctctccatgtcgatggcctttgagcccaacgcgtttgacgataaagatgccgtctttgccggtcagagcggtgaagatcctgccgggcgctacgcccgctacgtcgaccgcgatgccaccggcaaaccgacattgcacctgctgacggacatcgaaacgcccggcagcggcgattactatctgttgccgaaacagcggcataaagatgtgatcatcgaaccctatatttacccctacaacggcgtggacgtgatgctcacctcaattgccgcccccatcatgcgtgacggtcagtttctgggctcagtcacctctgacttctcgctcgccacgctgcagtccatgattggcgccattaaaccgtggaacggcacaggctacgccctgctcctgtgtgcgggcaataacgtggtgtccagcccggacaaaggtgcggcaggcaagccttacgcgggtcacattgcaggacatgacgtcactcgggtaaacgatccgctgctgaaagaagaggtgtttatcacctggcaggcgatcgccgtcggtaatagccagacgccgtggaaactcgccatcatcaccccggtcagcgaagtgatggccgaagcgcgcgcatttttactgaaggccatcgtcatgatggtgttaagcatcgttgcggttagcctggtgatggcccagatctttacccgcaaggttgaccgtccggtggggggagaaccttccgaggccgccgggatcgccctggccgtcgcccgcggggatctgaacaacaccatcccggtgcgatccggggatacccacagcattttttatgccctgcacaccatgcagacgcagctcaagcgcatcgtcgacaacatcagcgaagccagccactccgtgcacggcgggaccagcgaaatttcggcgggcaaccttgacctcgcctcgcgtaccgaggaacaggcggcggcgattgttgaaaccgctgccagcatggaagagatttcggttacggtgaagaacaatgccgacaacgcccacaaggcgaccaccctgaccgatcgcgccgcgagccttgccgggcatggcgaaacgctggtgaacgacgtggtcgtggtgatcggcgagattgatgagagcgcgcgcaagatcggtgagattaacagtatcgtcgatggcatcgccttccagaccaatatcctggcgctgaatgcggccgttgaagcggcgcacgcgggcgaacagggtcgcggtttcgcagtggtcgcaggtgaagtgcgcaatcttgcccagcgaagcgccaacgcggcaaaagagatctctcagctgattgccgagtcctcaggccgcgtcagcaaaggcgttgagctggtcaatgaaaccggcgtaatgatgaaacaggtgattgaggcggtgtcgcacgtgcatctggtcatcaacgacattgtccaggcgctggacgagcagaatcgggggattagccaggtcagtaccgccgttaaccagatggacagcaccacccagcagaacgcctctctggttcagcagatctctgcggcggcgctctcgctggacgagcaggctaaatcgctggagaagacgctggcgttctttcattcttaaataaaaaggcacccgcccggcgggtgccttttcacgccatgagcgttacagccctttcagcagcttgtcgacaaactccggaacaaccgtgctagccagaccgtagtgtttctcttcaaactcgctgcccacctggcttggctcaagattgagttcaaccgtatgcgcgccgtgcagtcgcgcttcgtggacaaaccccgccgccgggtaaacgtggccggatgtaccgatggcgataaacacgtcggccatcgccagcgcgctgtagatctcatccattcccagcggcatttcgccgaaccagaccacgtgcggacgcaggcgcgacgggaactggcagcagtggcacttatcctccggcagcacgtcctctttccagtccagcacctgaccgctccatgcgcagcgaaccttgagcagctcaccgtgcatatggatgatgttcctgttgccggctcgctcatgcaggttgtcgatattctgcgtcaccagcagaaaacgatcgcccagcgcctcttccagcttcgccagcgccagatgcgcggcattcggcgcgacgtcaggctgctgaagctgacgacggcgtgcgttataaaacgcctgcacaagatccgggtcacgggcaaagccttccggcgtggcaacatcctccacgcggtgctcttcccacagcccgtccgccgcgcggaaggttcgaattcctgactcggcggagatccccgccccggtcagcaccaccactctgggtttatccatcgcttctggcatcattctgtctctgaaaaagatccgctggcgcaagcgctcacgcaagcggcgtttatttttgcgaaaacggctgagtcgaccctggcgacgcgacagcatagaaacctcgtaaactaatcggtgagatgaaggaatgcggctccgcgcatgcctcctgcgtccccgtgtcgcgcgcgttcaatacgcggcacgcgggcaaccggcaataaatgtcggggcaaacgcccggacaaccgttccgtaatcgcggtaaagtttgagagccctcccccaatcaccagcagatccgggtcgacgatggtgagaatattgcccagacacaccgccagcagatccagatagcgctcgacgtgctcacgcgcctgcgcatccccttgctcccacagggtaatgatttgaggggcctcaagtttctgatgatagaagtgttcgtaaagccatgcaaacccgcggcctgacaggtagttctcaatacagccgtgctgcccgcagccgcagcgggtcagcgggaaatcacggccgacgacctccagcgcatccaccggcaggcggatatgaccaaactcgccggtgatatagctgcggccggtgatgggcttaccgttgatgacgattcctccgccgacgccggtaccgaggatcagccccatcaccagcgggtagcgacggaactcatcatcccaggcttcggagagcgcaaagcagttggcatcgttatctaaacgcacgtcgcgttcaaggagcgcggagagatcggcgcgcagcggtttaccgctggcggcaggcacgttggccgcgtaaagcgtaccatcgtcggtttccggcatgcccggaataccaatgccgacgctgcctttcacgccaaagcgttcatcggcctgcgccaccagcgcggcaatggcggttaaaaattcatcgtagctgtcgcgcggcgtgggaacgcgggtttcccactgcagtttgaggtctttatcaaacacgccgagcgcaatcttggtgccgccaatatcaaatccataatacataacgcattcctctttcgatctggcgacccgaaagccgctagatcgtgacgtaattactggccacttaataccctcgccggatcaattcggcttgcgcgacgcgccggataccagcttgccagcagactcagtaaaagtgctgtaagcagcacataaaaaacatccagccagtgcagttcagacggcaggaagtcaataaaatagatatcacccgacaggaactggtgaccaataagcttttcaatgccgttgataatcggcgttagctgcagggaaaccaccacgccaatcaccacgccgcacaggctgccgaacagccccgccagcaaaccgtaccagacgaagatggcgcgaataagaccgtcttttgccccaagggtacgcagcacggcgatgtcgccgctcttgtctttgaccgccatcaccagcgtcgagacgatattaaagcacgcgacaccgatcaccagcaccatcgccagatacataatggcgcggatcatctggatatcacggtacatatagccgtaagtgccgatccagcttttgatgtagacatagttattggtcacgctgcccgcgtcgcgcaccagtttgttagcgttaaagacgtcgttcaccttaatggcaatgcccgtcacgctgtcgcccatgtcgagatactggcgtgcatcctccatcggcaccatcgcaaagctgtggtcaagctgaccgctcagctgaagaataccggtaacgtgcaggcgcacgcgctttggctgctgcagtttgtgatcggcgctggcattcgggatcatgattgacacccagtcgccctgcttcaccttcagggcatcagcaacgcctttacccatgatgatctgctgctcgcccgccttgaagttggcccacgcgccgttctgcacgtagttcggcagcgcgctgaggcgcgcttcctgcgtcggattcacccctttcacctggatggcgcgcaggtttaccccgctctccaccagcccggtaaagttaatgtagggcgcagccgcggcgatgccgggcactttttccactttgttcagggcgtcgctccagttagtccacggctggttaaccggttcgatctccccgtgcggcacgaccgccagaatacggttattcagctcgcgctcgaagccgttcatggcgcttaagcccacgatcagcaccgccacacccagcgcaataccgatggtcgagataacggagatcagcgacaccatgccgccgcgacggcggccgcggctaaaacgtaaaccgatgagtaacgataacggtgacgccattactctgctcccatcagggtcagttccgcgttcagatggccgtcgcgcatctcaagctggcgccccatgcgttttgccagctgcagatcgtgggtcaccaccagaaacgcggtgccctgcgaggcgttcagctcgcccagaagctggaaaatactgtccgcgttgcgcgcgtccaggttaccggtaggctcatccgccagcaccagacgcgggttgttgaccagcgcacgggcaatcgccacgcgctgacgctcgccgccggacagctccgacggacggtggtttccgcgatggcccagccctaccgctttcagcatgtcgctggcgcgggcgttaatctcagccggtttctttttgccaatcagcagcggcatcgccacgttttccagcgcagtgaaatccggcagcaggtggtggaactggtagataaagcccagctcgcggttacgcagctcggccttcgctgctgaggacattttgctcatcggctggccggagaaaatcacgtcgccgttggttggggtatccagcccgcccagcaggtgcagcagcgtactcttaccggagccggagctgccgacaatcgccatcatctcgccttcacccacgctaaagctcacattgtgcagcacgtcggtttgcacagtgccttcctgatagcgtttggacaggttgtcgcattgcaacaggatcttattcataacgtaaagcctcagcgggttgagtggcggcggcgcgccaggaaggataaagcgttgaaagcagcgcaatggccatcgcggccagcgcaataccgaccacctgcagcggctcgatggccaccggcagcgccgcgccgtcgagcagcgcgccgataatcggcattaagttgttgagctggctggcaagcagtgcccccagcacggcaccgagcagcgcaccgatgataccggcgctggccccctgcaccataaacacggccatgatctggcgcggcgtcagcccctgggtttgcaggatagcgacctcgccctgcttctccatcaccatcagccccagcgaggtgatgatgttaaaagcagccacggcgacgatcaggctcagcagcagccccatcatgtttttctccatccgcacggcctggaacagctcgcctttacgctcgcgccagtcctgccatttggtgccgtccggcagtttttgctggctgagggtatcgaccttcagcggcgcgtcgagccacaggcgccagccggtgatattgccggccgggtagcgcatcaggcgtgacgcgtcctggatgttaaccagcatctggtagccatcgacttcactgttggcggcaaaggtcccaatcacggtgaacaggcgttggcttggcaggcgccccatcggcgtaaactggctggctgaaggcaccatcacgcggagctggtcgccgcggttgacgccaagctgaccggcaagctgctcacccagaatcacgttgtatttcccggcttccagatcggtctgcttcacgttaacgagatacggcgtcagcggatctttttgtgccgggtcaatacctagcatcacgccgaccgccacgctgcgggcgctttgcagcaccacgtcgccggtggtcattggcgcaacgcgcgtgacgccctgtaacttcgccgcgctttccggcagctgctgtgggttaaccgaaccgttagtcgatgagagtacggcctgcggcatcagccccaggatgttgttttgcagctcgcgctcgaagccattcatgacggaaagcaccgtcaccagtgccatcacgccaagcgtaatgccaatagtcgaaagccaggagacaaagcgaccgaagcggtccgcggcgcgcccacgcatgtagcgtaagcctatgaagagtgcgacaggttgatacatgaagtccgtctgtttgctgatagcagacccacgagtatataagcgaatccgttaagcgtaaatgactgaaaccgtaagctttggtaatcatttttccaaaaaattcagataaatcagggtactaatatctgaaaccgcccctcgcaacctccaccttttccgaaaaacctcctgatacagactgttacccattacagcccggtttcgtttaacaacaattgctcgttcgtctatggcaataaggtagttgcgaacaatgaagcaaaaagcattatggattaaccagataaaagggctgtgtatatgcctggtggttatctaccattcagttatcacgttttatccgcacctgatcgggctgcaacacccgctctctggccttctcgccaaatgctggatctattttaatctctatctcgcccccttccgtatgccggtctttttctttatctccggctatctgatccgtcgttatattgacgaggtggactggcgaaccagcctcgacaagcgaatctggagcattgtctgggttctggcgctgtgggggattctgcaatggcaggcgctgacccacctgaacgcctggctggcgcccgatcgcgaggttgccacctcgtcgaacgcggcctacgccgattcgctccagggatttgtgcaagggatgctcaccgccagcaccagcctgtggtatctgtatgccctggtggtctacttcacgttgtgtaaactgctgagccgctggaagctgccgatgctgggactgctggcgctggcaagcatcgcgatcaacttcctgccgctgccgtggtggggaatgaacagcgtggtacgcaacatgatctactatagcctcggggcgtggtatggcgctgagctgatggcatggatgaaaaatctaaacctgcgccgcacctggctggcaacgggcgctttcgccgccgtctccgtggtgctgtggtttgctaacgttccgctgctgctctccttgctgtcgattgtgctgatcatgaagctgttctacagcgttgagcagcgctatgccgttcaccctgacaacctgctgaacgtgattggctccaataccattgcgatttataccacccaccgcatcctcattgaggcctttagcctgttcctgatcggcgagatgaatgccgcttactggccggtctgggccgaactcaccttaattctggtctacccgtttgccagcctgcttatctgtaccctggccgggctgggggtgcgtaaactctccaccgcgctgttcggggacattttcttttctccgccttcgacgcttacgctctcgccgaccacccgttaatgccctctccgccccctttcgggggcgtataaccccgccgtgcggttacgatttgcttatgtaaaacgatcgaggataataaagacattgcgtatcagtgatatgccccaatactgttggtatatccataagagactctgacatagccatgcctgaacactatcgttattccttgcctgtcaaagcgggcgaccagcgccagctgggtgaactcacgggcgcagcgtgcgccacgctggtggcggaaattgctgagcgtcatcctggcccggtgatcctggttgccccggatatgcaaaacgccctgcgcctgcacgatgaaattcgccagttcaccgataatctggtgttcagcctggccgactgggaaacgctgccctatgacagcttctctccgcaccaggagatcatctcctcgcgcctgtcgacgctgtatcaactcccggccatgcagcgcggcgtgctgattgtgccggtaaacaccctgatgcagcgcgtctgtccgcacagctatctgcacggtcacgcgctggtaatgaaaaaaggccagcgcctgtcccgtgatgccctgcgggcgcagcttgacggcgccgggtatcgccacgtcgatcaggtgatggagcacggggaatatgcgacccgcggcgcgctgctcgacctttacccgatgggcagcgaccagccgtatcgtctggactttttcgatgatgaaatcgacagcctgcgcgtcttcgacgccgatacgcagcgcacgctggaggaagtggagtccatcaatttactgcccgcgcatgagttcccgacggacaaaaccgctatcgaactgttccgcagccagtggcgcgataagttcgaggtgaagcgcgacgcggaacatatttatcaacaggtcagcaaaggcacgctgcctgccgggatcgaatactggcagccgctgttcttcagcgagccgctccctgccctgttcagctacttcccggcgaatacgctgattgttaacaccggggatatcgacgccagcgccagccgctttgaaagcgaaacccgcgctcgcttcgaaaaccggggcgttgacccgatgcgtccgctgctgccgccggaagcgctgtggctgcgtaccgacgagctcaacgccgagctgaagcgctggccgcggatgcagctgaaaaccgattcgcttgccgataaggccgctaacaccaacctcgccttccggacgctgccggacctggccgtccaggcgcagcagaaatccccgctggataatctgcgcaagtttctggagtcgtttaccggcccggcggtgttctccgttgagagtgaaggccgtcgcgaagcgttaggtgagctgctgggacgcattaaggtggcgccgaagcgcatcctgcgcctgagcgaagcgaccggaaacggccgttacctgatgattggcgccgccgagcatgggttcatcgacacgctcaacaacctggcgctgatttgcgaaagcgacctgctgggcgagcgcgtcgcgcgccgtcgtcaggacagccgtcgaaccatcaacccggacacgctgatccgcaacctggccgagctgcatccgggccagccgattgtgcacctggagcatggcgttgggcgctatcagggcatgaccacgctcgaggcgggcggcattaaaggtgaatacctgatgctgacctacgcgaacgacgccaaactgtatgtcccggtgtcgtccctgcatctgatcagccgctacgcgggcggggccgaagagaacgcgcctctgcacaagctgggcggcgacgcctgggcgcgcgcgcgccagaaggccgcggaaaaagtgcgcgacgtggccgccgagctgctggatatctacgcccagcgcgcggccaaagagggcttcgcctttaagcatgataaggaacagtatcagctcttctgcgacagcttcccgtttgaaaccacgccggatcaggctcaggctattaacgccgtgctgagcgacatgtgccagccgctggcgatggaccgtttagtgtgcggcgacgtcggcttcggcaaaaccgaagtggcgatgcgcgccgccttccttgcggtggaaaacaacaagcaggtggcggtgctggtgccaaccaccctgctcgctcagcagcacttcgacaacttccgcgaccgcttcgccaactggccggtacgcatcgagatgctgtcacgttttcgcagcaccaaagagcagacgcagatcctggagcaggcaagcgaaggcaaaattgacattctgatcggtacccacaagctgctgcaaagcgacgtgaagtggaaagatctggggctgctgatcgtcgacgaagagcaccgcttcggggtgcgtcataaggaacgcatcaaagcgatgcgcgccgacgtcgatatcctgaccctgaccgcgacgccgatcccgcgaaccctgaacatggcaatgagcggcatgcgcgatctgtcgattattgccacgccgccggcgcgccgtctggcggtaaaaaccttcgtccgcgaatacgataatctggtggtgcgtgaggccattctgcgtgaagtgctgcgcgggggtcaggtctattacctgtacaacgacgtggaaaacatccagaaagcggccgacaggctggcggagctggtgccggaagcgcgcattgctatcggtcacgggcagatgcgcgagcgcgagctggaacgggtgatgaacgacttccaccatcagcgctttaacgtgctggtgtgtaccaccatcatcgaaaccgggatcgacattccgacggcgaacaccatcatcattgaacgtgcggatcactttggcctggcgcagcttcaccagttgcgcggccgcgtcgggcgttcgcaccatcaggcctacgcctggctgctgacgccgcatccgaaagcgatgaccaccgatgcgcagaagcgtctggaagccatcgcctcgctggaagacctcggcgcaggcttcgcgctggccacgcacgatctcgagatccgcggtgccggtgaactgctgggtgaggaccagagcggctcgatggaaaccattggcttctcgctctatatggagctgcttgagaacgcggttgatgccctgaaggccgggcgcgagccgtcgctggaagatctcaccagccagcagaccgaggtcgagctgcgcatgccttccctgctgccggatgatttcattccggacgtgaatacccgactgtcgttctacaagcgcatcgccagtgcgaagacggaaagcgagctggaagagattaaggttgagctgatcgaccgctttggtctgctgcccgatgcggcgcgaaatctgctggatatcgcgcgcctgcgccagcaggcgcagaagctgggcattcgcaagcttgaaggcaacgaaaaaggcggcgtgattgagttcgccgagaagaaccacgtcaacccgatgtggctcatcggtctgctgcaaaaacagccgcagcatttccgtctggatggcccaacgcgtctgaaatttacccaggagctgacggagcgcaaaacccgcatggactgggtgcgtaactttatgcgccagctggaagagaacgcgatcgcctgaccctccttcccccgttagcccagcgctaacgggggacaatttacaaactctttgcacttcacccgatcttcccgacacacccattcgccataattatcgttaacgccttatgaaacaataaccttatcatttgcatggattatggtgatgatgacctcttcgcgtatgactcgctggttaaccctgtttgcgctggcagccaccgttgcggttgcgcttcccgctcgcgcaaatacctggccccttcctccgcccggcagcaaggtggtgggggaaaaccgctttcatgtggttgaaaataatggcggttcgctggaagccattgccaaaaaatataacgttggttttctggccctgctgcaggcgaaccctggcgtcgacccctacgtcccgcgcgcgggcagcgtattgactatcccgttacagactatcctgccggacgctccgcgtgaggggatcgtcataaatctggcggagctgcgtctgtactattacccgccgggtaaaaatgaggtgaccgtctacccgattggtattggtcagctgggcggcgacaccctgacgccgacgatggtcacgaccgtctcggataaacgcgcgaatccaacctggacaccaacggccaatattcgtgcacggtataaagctcagggcatcgatcttccagccgtggtgccagcaggcccggataacccgatgggtcaccacgcgatccgtctggcggcctacggcggcgtttacctgctgcacggaacgaatgcggactttggcatcggcatgcgcgtcagctcgggctgcattcgtctgcgcgatgacgatatcaaaacgctgtttaacgtcgttacgccgggtaccaaagtcaatatcatcaatacgccgatcaaggtttctgaggagccgggcggcgtgcggctggttgaaattcaccagccgctgtcgaaaaacattggcgatgacccgcagacgctgcccattaacctgaatgccgcgatggtaagctttaaaacgaatgcgaataccaacagcgaggtgatggagcgcgcaatggaggcccgctcaggcatgccgaccgacgtcacccggcatcacgatgtcatccagcaatcgatgtaaatcataaataaaaaaacgccctgctaagcagggcgttttttattgcagtggcataaatgagggtttatgcccggcttatttatagatgacggcggtgccgtgcagggtgttaggaccggtcacagaggtgatgcggtaagattttgcacccatctcttgcgctttttgcgccagctgatcttccagtgaacccaggttagtcccggcagaggcagagatcgtgccgactttatgctgatcgaccggggtggactgtacctgtacagccgcaaagcttgcgaaagagagtgaactcaggacagcagcagcgatgagggtttttacgtttttcatgatgtttacctttagcagatgaatttggaggtcgttagctatttagttaacgatcgataggtaaatcataaatgtgatccatctcacacgtcaacataattttataatggtcgttaacttaattttaaagtcgttatttttcatactcatatgattaatttatttttaagcattcagcgctggtggtgacttgcgtttatttttataatggtcattcaacaaaccaacagaggaccaacggcacatgacaaccgacgtcacgagttgtgcaaagaaaagccgtggccgaccaaaagtgtttgacagggatgcagcgcttgataaggccatgactctcttctggcaacatgggtatgaagcaacctcgctttccgatctggtagaagccaccggcgccaaagcgccgacgctctatgccgaatttaccaataaagaggggctgttcagggcagtgctagacagatacatttcgcgctttgcggcgaaacacgaagcccagctgttttgtgaagagaaaagcgtcgaacaggcgcttcgggattactttaccgccgtcgcgacctgcttcaccagtaaggacacgcctgcgggctgctttatgattaacacctctgccaccctggcggcgtcctcgaaagagattgccaatacggtgaaatcgcgtcatgccatgcaggaggagacgctgagcgcctttctggctcagcggcagcagcgcggtgaaatccctgcacagtgcaaccctcagctgctggcgcaatacctgagctgtattttgcaggggatgtcgatcagcgcccgtgaaggggcaacgctggaaaaactgcagaatatcagcgacaccacgctgcggctgtggcctgagctcctcaaaatctgaagcaaaaaaaaagctcctcagcctgagcgcatgaggagctaaattcagagaacatcttttttacactttgttattcagaaccagctggccatttccatcgagcggaatttgcgtgcccgggtctttatccatgcggattttaccctgctgatcgccaattttgtacgtcacgtcataacccagcattttttccgacttgtcatagacggttttgcagcgttgctgagtcgtggtgtaggtatcattatcctgcatcgcgccctgcacctggttaccggcatagccgccacccagcgcgccgaccacggtcgccacatctttaccccggccgccgccaaactggtgaccaatcacgccacccgctaccgcacccagaacagaaccggcgatacggttttcatcctgcaccggacgacgatgcgtcacggagacgttacggcactcctgacgaggcgtttttaccgtttctttaatcggtgtagcagaaaccacctgcgcatactgcgggccgcggtctaatacgttgagactggcaacggcagccacacctaacgcagccgcgacgccaatccctatacccgccaacattgatttattcacgggacttcctcctttgttgctattagtaacaattttgcaatggaggcacggcttcgccaatcagataaaggatcaaaaaaggggcatagcgaggagatatattctatttaggagaactcttaagcagtcaaacggtgatctacagcatgaaatgctaaaaactccctccggagagcccggagggagtgaaagattagtgcagcttcagacgcggacggatcacgcggttgattctgcccaccagcatcatcagcccggttttgaagtagccgtgcagcgcaatctggtgcatacggtacagggagatgtacacgaagcgggcaatgcgcccttctaccatcatcgagccccgcatcaggttgcccatcaggctgccgacggttgagaagtttgacagagacaccagagaaccgtggtctttgtaaacataggccttccttggcttgcctttgtactgcgccagaatgttgtgcaggaccaggcttgccatctggtgtgcagcctgggcgcgcggcggcacgaatccaccttcaggacgggcgcaggaggcgcagtcaccgatagcaaagatttcagggtcacgcgtggtttgcagcgttggctccgtgaccagctgattaatgcgattggtttccaggccgccgatatctttcataaagtcaggcgctttgatacctgccgcccagaccatcagatccgctttgatatactcgccgtctttggtgtgcaggccgccttcgtcggcgctggtcaccatggtctgcgtcagcacccgcacgcccagcttggtgagttcattgtgcgccgcaccggaaatacgcggaggcagcgcaggcagaatgcgttcaccggcttcgaccagcgtgacgttcagcgcttcgttcgttaaccctttgtaaccgtagctgtgcagctgcttcaccgcattgtgcagctcagcggacagctcaacacccgtcgcaccgccgccgacaatggcgatattgaccttaccgttcgcacccatattgctggtgtacttcaggaacaggttcagcatttcctgatggaaacgacgcgcctggtgcgggttatcgaggaagatacagtgctctttcacgcccggcgtgttgaagtcgttggaggtactgcccagcgccatgaccagggtgtcgtacggcagcttgcgctcaggaaccaacagctcccctttttcatcacgcagttctgccagagtgatggttttgctttcacggttgatgtccaccaccgagcccagctggaactggaaatgatggttgcgcgcgtgtgccagatagctgagcgcgtccacgccctcgtccagagagccggtcgccacttcgtgcagcagcggtttccacaggtggctgtggttacgatccaccagcgtgattttggcttttttaccgcgccccagcttcttacccaactgtgtcgccagctccagcccgccagcaccaccgcctacaatcactatctttttcaatggcgtagtcaacgtgaccccctcaaattattaaccaattgttaattaaaagttataaaaataatccttaattaacaacaggttacatcactgaaaccattcaggtgcattgagaataccacgtcaggcgcattggtcataccaaaattgatatgcatcaagttttgatggcttaaaagtagacaattctggtcaaaaagaaacccggtgcgcgtttgcgaccgggtttctgaagtggcaggctgtagtttagcccagcgttttaaaggctttgatgcgctgcagatgcggggagatgttcttgaacttgtgggtctgttcttcgtcccagacaatttcatagtaatgatgcagaagttctgcagcccggtggctgttgagcgcctcatcgttacgcgacaggatcaccaggcagcggtcacggtttttctcccgaaaattgctgacgcacttggtcgcaatatcgacatactcttccgggcggtcaatcttgccttccatgttctcgttcgggaaaaggttgggattgaatacgacctggcggatgtcgcacaggaagccaatccgctctgcccagtagccgcccagccccacgccgcaaatcaacggccgatcgtcgacgttgagctgcaacatcttgtccacctctttgagcaggtgctgcatatcatgcttcggatggcgcgtgctgtagctgatcaaccggacatccggatcgataaactgcagctgcagcaccttctcatgattaccaggactgtttgagtcaaaaccgtgtaaatagatgatcatcgtcttctcaccacgctacgccttccgggagggtttacaggctggctttatgtgcctgccagcgctcattcaggtcttcaagccgggcgttgaccgtcttccagcgcgccgaatccatcagctcctgacggctaaatgaacctttatgatacaattgtgtaacacgctctgcattgatcggcgacaggttatccagcacgctaacggcacctttacgattattgcagaccaggatcatatcgcaacctgcatccagcgacgcctgaccgcgttcagcgtagctgcccataatcgccgccccttccattgatagatcgtcagagaaaatcacgccattgaagcccagctcctgacgcagaacggttttcagccagtgcggagagccgctggcaggacgtgggtcaacgtcgctgtaaatcacgtgcgcaggcatgatggcatccagcttgttgtcggtgataagcgacctgaacaccgacatatctttggcgcgaatttctgcttccggacgcggatcgcgcggggtctctttatgcgagtccaccgttaccgccccgtggccagggaagtgtttcccggtggttttcatcccggcatcgtgcatgccgtcaatgaagcgggtcgccatggccagcgcaatgcgcggatcgtcatggtacgagcgctcgccaatggcggcgctgatatgccccacgtccagaaccggggcaaaactgatgtcgatatccatggcaatcatttcactggccatcagccagccggcctcctgcgccagtgtcccgccctcttcagtgccgagcagcgcggcaaaagactgggccgccggcaggcgggtaaacccttcgcgaaagcgctgcacgcgtccgccttcctgatcgacggcgaccaccagatgattgcgcgacgcggcgcggatctgacgcaccagctcgcgcagctgcgccggatcgtgatagttgcgggtaaacaggatcaggccccccaccagcggatgcgccagaatttcacgctcctccgcatccagctcaaacccttctacatccaacatgactggacccacatccacctctcttatcctttcgtttataactgacgccaggcatcgtctgccagcgcaataaaatgtttgtctcttgactgctgatagcgcatttcaaaccagccagccattaacatgacgacccatggccgccagcgtttgacctgacgcctcagcgcgtcggcgtcaatgtgcgccacctcggcgtagtccctgataagcctctgccgcgcgtcgtcactctccgtccagactgccgccagctccagcgccacatcgccatctccggcgtattcccagtcgatgagcctgatgccctctgccgtatgcacagtatttccggcatgaacatccatgtgcagcggcgatagccgaatcggctgcggctcgcctgctttacgcaaccgcttgagatgtgccagccacactggagtgcgtctgtcaggcgcggcctgctgccagtagcgttcaagcagcgggtataacgtgattcgccatcccagacgtggctgccggtgcagatgatacagcattgccacgagcgccggcgtgtccggcagcgcgcttttcacgtcaccgtccagatagtcgacggccatccagccctctctgaaaaaacggggggcaggcacgagatctgacggaagacgcctcagggcgcgaaactgacgacggaaatgggaggtaggcgcataggggtcgtgatgttgccgcaagaccaggcgtcgttcgccctgcgcaataatgcaactcgcgccgccaagcccggagtgggcctgcggcgcgataaggcggtactgaggaaaatagcgcgtcagaatctcttcacgcgtgctgtcattgttgcgtaaccgcacctttacctgaccagataatttcgcctgtctgaaccagcatcagctgcatctgcagggccggtgtattcacgttaccggtggcgttagagtacagcacatactgtgcgccaacgttacgggcaatgccgatcgccttgctgcgtgtgccgaggctatcctgcggcgacaggcccagctgctgtttggctaccgcgagttgctgagccgagaccagcgtaaacttaccgttgtttgccagcgcattgcgcagcgtttccgtcgcttcgcccgcgttcagcgaaccgttggtacggttgttcacgctatcaaccagcaacacgctgcctgccgtcacgccctgtgcctgcagcattttgccgaccatgggctgcattgcgccgttccagtcgtaatggcgcacgcgcggcgtgggctgtgacgtctggtctggatgctcaatcgggccaggctgtgacggaatagacggcacagacggcacggttggctgcggctgcgttggctgtgtcggctgttcagtgcccggtttcgcctcttccacaggcgctggctgttcagttcgggtcacacaccccgccaggaacagcgcgaaagctgtcacgagcgcatagcggctcaagtttttaatcaaggttcaccccttagagataaagataaagtctcaccttatgcgcacccagatagttagcgctgccatagagcgttaccgacgatctggccggaatggtgacgctgcgcggcgcctccagcggatgcatttcaagacctcttacgtcataccagaaaaaacggtagtggaccgtcacgggttcatgtctttcattaaagagcgtagaggaggcagatgaattgatttcactgatggtcagcacgggttgttgcgccgtgatgcccgcggcaagcacggaggattccatcaccagcgtctgttcatcgttcacggggatcgccgggcgcgagctgcaccccacaatcatcatcgtcaataccagcgctgcaatacgccctttacgcatatcaaagacctttatgtgccagcatcggccccagaggacgtccacccagcagatgcatgtgaatatgataaacttcctgaccaccatgacggttgcagttcatgatcagacggtaaccgtcttccgcaatgccttcctgttcagcgattttcgcggccaccgtcagcatacgacctaacgccacttcatgctcggtttttacgtcgtttacggtcggaatcagaatattgggaatgataaggacgtgcgtcggggcctgaggggaaatatcccggaaagccgttaccagttcatcctgatagacgatatccgacgggatttcgcgacggataattttactgaaaatcgtttcttcagccatgaccttttccttttttgtttaatctggcgcgagcaattgctgttaacacacgctctggttgagtgcgtgacacaattcaagagtatgagcgagtttctcctgtcctttcaacctcctccctcgatttctttcctgaatgttcatcagctgaacgaagagtgaccgttaaagcgtgctgctgcatttttttaagacagaaataaaaaaggcagccattaggctgccttagtctccccaggtcacagcttagttgttgcggatgtattcatccatttcggttttcaggttatcggatttcgtaccgaaaattgcctgtacaccagaacctgcaacaaccacgcccgctgcgcccagttttttcagacccggctggtctactttcgcgacgtcggcaacgctcacacgcagacgagtgatgcacgcgtccaggttagtgatgttctctttaccgccgaacgcggcaaccagtgccggagccatttcgctggtcgcgccagctttgctgtcttctgtcgcatcttcacggcctggggttttcaggtccagtgctttaatcagcacgcggaagatggtgtagtaaacaacggcgtagcacgcacccacgattgggaacagccacagtttgctgctgttaccggacagaacgatgaagtcgatcagaccgtgagagaaggacgtaccgtcacgcatacccagcagaatacagattgggaacgccagccccgccagaatcgcgtggataacgtacaggatcggcgcaacgaacatgaaggagaactcgatcggctcggtgataccggtcaggaacgaggtcagcgctgcggagatcatgataccgcccacttttgcacggttctctggcttagcagagtgccagatagcaatcgccgctgctggcagaccgtacattttgaacaggaagccaccagacagtttacctgcagttgggtcacccgccatgtaacgtgggatatcgccgtggaatacctggcctgctgcgttggtgaattcaccaatctgcatctggaatggaacgttccagatgtggtgcagaccgaatggcaccaggcaacgctcgatgaagccgtagataccaaacgccacaaccgggttctggtaagcagcccactgagagaaggtctggatagcggagccgattggtggccagatgaaggacaggatcacgccagtgaaaatcgctgccagaccagagatgatcggaacgaaacgcttgcccgcgaagaagcccaggtactcaggcagcttgatgcgatagaagcggttgaacatgtacgctgcaatcgcaccggaaatgataccgcccagaacaccggtgtccgccaggtgtttcgcggcgatctcttctgccggtaaatgcagaaccagcggcgcaaccacagccatggttttcaccatgatgccgtaagcaaccactgcagccagcgcagatacgccgtcgttattggtgaagcccagagccacaccgatcgcgaagatcagcggcatgttagcaaagacagaaccgcctgcttcggccatcacatgggacactacggctggcagccagctgaagttagcagaaccgacacccagcaggatacctgcgataggcagtacggatactggcagcatcagcgatttaccgaccttttgcaggttagcaaatgcattcttaaacataattgagagtgctcctgagtatttgtgctttttttacgctttcacgcattggcccggggggagtaccgtgccgtggacaggacatctaagcgccctttatttattacacagagtaaaataattccctctgagtttgtttgacggctatcacgtttcagcttaaggcggtcgaaaaactttcagttatttacaaaaagcatgtccggatgtgtctaaaaacaccctcaccgccccaaatgaggcggtgaactttactcgttttatttattaattacgagcctaaaaaaaacaggtgtatcagacagattgcaggcgggcggggtcaatatggaacagcgttgagaagttttccgtggtcacgcgggccagctcttcgatgctgacgcccttcagtacggccatgtactcagccacgtctcgcgtcatcgccggttggttctctttaccgcgatgcggtaccggggccagatacggagagtctgtctccaccagaattcgatcgagcggaacataacgcgcggcatcccggagctgctcagcgttacggaacgtcacgatcccggaaaacgaaatataaaaccctaaatcaagcagtttacccgccgtttctctgtcttctgtgaaacagtgtagtacgccaccgcaatccgtcacgttttcttcccgaaggatcgccagggtatcggcacgcgcatcgcgggtatgcacaatgaccggcttgttcagttcgcggccaatgcggatatgatggcggaaggactcctgctgccgcggtttcgtttccggcgtgtaaaaatagtccaggcccgtctcccccatcgccaccacgccctcttctgctgccagtcggcgcagttcctcaacgtcatacgcctcgtcctgattcagcggatgcacgccgcaggagaacactacgttgtcgcgaacgcccaccagctcacgcatggtgcgataacccggcagcgtcgtcgccaccgcaaggcagaatttcacatcgcgggcagcggctttttccagcacgtcatccacgtttttatgcagggattgataatccaggccatcaagatggcagtgtgagtcgactaaaaacataatgtctctctcagagatgggaaactggcggtgtgacgccgggttgcaggtaatgttcaatacgcagtaactggtcggtcagtaaaagctcgcgattaagccccgtcacggttaaaagctgttcgcggctctggcaaacttcatgaagcatcgcgtgaagaatcgcgccggagaggcggttcgccagcgtactcaccagtggccacgcgtcagggttagtcagcagcgttgccccttgctgaattttaagggcatccagcagcaacgcggccagccagtgcagacgctcaacggcactatcgctgttaagtgtcgggagtaagcttagccagtcgttgttattcagcgccgcttcaacggcccggcagagcgcttctcgctgtgaccagacgtcaggttgcagcatggccagcgccgccgcgggcgcgccgctactcaggcgcaaggcggacagcgcactttcaggtgacgttgtcacctctcgctccagccagctcagcgcccatgattcctgaggcaccgcaaggtgatgaagacggcagcggctgcgcaacgtcgccagcaatcgtcccggatcgcggcacgagaggaaaaaccacgttttttccggcggctcttcaagagtcttaagcagggcgttagccgccgcctcggtcagcagggtggcgtctttgagcaagacgaccttagcgccacccagacgcgcatgttcgtacaatttttcactgacctcacgcacggcatcaatacccagcgcgctcttgcccttctcaggctcaagggtgtagtagtcaggatgtgtgcccgcctgcatcagctggcagccgcggcacttaccacagcttttgtgcccttccggctgctggcacatcagaaaacgggtgagggcataaattaacgcctgatcccccatccctggcaatgcctgaatcagtaacgcatgatgctcccgccccgcctgatagctgccgatcagctgctcaaagtgcggacgcaaccatggataccatttcatgcctgctgctcctgtacccactgcgtaacggtctgctggatgttgtgcgtgacgtcatccagcgactgcgtcgcatcgatggtacgaatagcgctatcctgtgccgccagctcaagatagcgcgcacgggtgcggttaaagaaatcaaaggactcttgttcaatgcggtccagctcgccgcgcgcgcgggcgcgtttgaggcccacttccggcgtaacatccagatagagggtcaggtcggggcgaaaatcacccagtacggcatcgcgcagcgttgccagcatcgtctggtcaataccgcgtcccccgccctggtaggcctgagtcgacagatcgtggcgatcgccgatcacccatttaccctcggccaacgcgggtttgatcaccgtctcaaccagctgtacgcgcgccgcgtagaacatcaacacttcggctttgtcagtgataacttcgtcgccaacggatttaatatccagcaccaggctgcgcagtttctccgcaagttgtgtaccgcccggctcgcgggtgaagaccatgtcggcgacgccaagcgatttcagcgtgtccaccactacgttgcgggcagtggttttacccgccccttcgagtccctcaatgacaatgtatttactgcgcatttttttccttaagtgccttcagatagtcctgaacagagcgattgtggctggcaaggttggtgttaaaggtatgccccccttttccatcagccacaaaatagagatacggtgttttcgccgggtgcgcggcggctttgagagaagcctcgctcggcgtggcaatcgggccaggcggtaaaccgctaatcacgtaggtattatacgccgttggcgtttccagatcttttctggaaatcttgccggtatagctctcacccatgccgtagataacggtagggtcggtttgcaggcgcataccaatgcgcagacggttgataaatactgacgccacccgatcgcgttcagcagcaacggcggtctctttctcgataatcgaggccatggtaacaaactgattttgatctttataaggtaaaccatccattcgcccttcccaggcggcatccacggcggcgaccatttttttgtgcgcccgcttcagaatcgccgcatcggtcgtgcctgcggtgtacatccaggtatctggccagaaccagccttccacccattcaggatgctcaaacttgagcacgtcggccaccgtctggtagctgttgtccttcagggtatgtttgatatacggcgcatcgcgcagctgtttgaggtaatcgctcaggcgcatcccttcgacaaaacgcagcgggaactgggcttctttaccgctttccagcagttgcagcatctccctgacggtcatgccgggcgtaaagcggtaggtaccggccttgaagtgagataggtcaggctcaatacgcaataaccactggaacacacgaggacggttaatgattttatccgcgtaaagctgctcgcccagcgccatccgcccggtaccggctttcagggtaaaaatcgtctcgtctttaatcaagattttactgttcgccagctggcggactttccatacccccgctccgccagcaatgaccagcgcaataataaggagaaggacaaaacgcaacattttcttcatgactatctggtttgctcacatatcggggctaaaaactggaacagctcgcgcgaagaccagcgctgttggtcatacgcacggacgggtataacaggcatcagcgcattgcagatcacaacttcatcggcggacagcagcgcctcttccttcgcgtttacttcgacaacgcgaaaacctgcatgtgccagttgttgcaaacaaaactggcgcatgatgccgttaaccccagcctgctccagcgaaggggtgaagacctcacggcccttccgccagagtaaattagccgcacagcattccgtaatgaacccttcgctgtcaaggactagcgcctcatcggcgtccgtctgttcaagatgagtacgaataagcacctgctcaaggcgattaagatgttttagtccggcaagcatcgggtttcgccccagccgcaccgggctcagcgtcaacgtcacgccctcttcacgccagcgcgcatagtgagcaggataagctgaaacagagagaatacgtgttggatgctgacaggcggcaccgctgtacccccgcccgccgctgcctcggctaatgataacttttaagacaccgctggttttacctgacgccagctgacgcatctcatgttcaagaatttcccactgcgtaaaagggatcagtaacgtctggcaggcgtcttgtaaacggcggaggtgtgcatcaagcaggcacacgtcgccttccagaatacgcgcagtcgtaaagcagccatcgccaaactgcgtcgccctgtcgcttgccggcagcgtgtcttgctcaaggccattaattaaaaacatggtggctccttatgcgtgggcgtttagtctggcaggatgccatgcaaccgacaagaagattaggcttaataaaaaaggcccggcaagcggacctttttttatagctttcgggccgtcaggctcagacctttttgaagatcagagaaccattcgtgccgccaaagccgaaggagttacacagggtgtactccataccgctaacctggcgcgcttcatgaggaacgaagtccagatcgcaaccttcatccgggttatccaggttgatggttggcggaacagcctgatcgcgcagcgcaaggatagagtagatggactctactgcacccgcagcacccagcaggtgaccggtcatagatttcgtggagctaaccagtacgcggctggcagactcgccgaagatagacttcacagcctgcgcttcagctttgtcgcccgctggcgtagaggtaccgtgagcgttaacgtagccaatctgcgctggggtaatacccgcatcacggatcgcgttttccatcgccagcgcagcacccgccccgttctccggaggagaggtcatgtgataagcatcgctgctcataccaaagccaacgacttcagcataaattttcgcaccgcgttttttcgcatgttcgtactcttccagcacgagcatacctgcgccgtcacccaacacgaaaccatcgcggtctttatcccacggacggctcgccgcctgaggattatcgttacgggtagaaagcgcacgcgctgcaccaaagccaccgacacccaatggggtactggctttttcagcaccgcccgcaaccatagcatctgcatcgccgtacgcaatgatacgcgcggcctggccgatgttatgcacgccagacgtacacgcggtagcgatagaaatgcttggcccacgcaggccgaacataatggtcaggtgacctgccaccatgttaacaatcgtggacggaacgaagaacgggctgatcttacgcggtccgccattcatcagcgatgtatggttttcctcgatcaggccaagaccgccaatcccggagccgatagcagcgccgatacgggttgcgttctcttccgtaatctcaaggccagaatcctgcatggcctgaacgccagcgacaattccatattgaatgaaggcatccatcttgcgctgttctttgcgcgagatgatctcttcacagttaaaatcctttactaagccagcaaatttcgttgcataggcgctagtatcgaaatggtcgattaggctgatgccgctctgaccggcaaggagagctttccaggtggactctacggtattgccgacaggagacaacatgccaagtccggtcacaactacacgacgcttagacacgtttgtcctccagggaggggtaaaaaaagagattcgtgggactaaaaaagataaaactcaggcggtcgaatgaccgcctggagatgttcacttacgcctggtggccgttgatgtaatcaatggcagcctgaacggtggtgattttctcagcttcttcgtccggaatctcagtatcaaactcttcttccagagccattaccagctcaacggtgtcaagagaatctgcgcccaggtcttcaacgaaggaagcggagttcacaacttcttcctgcttaacgcccagctgttcgccgataattttcttaacgcgttcttcgatagtgctcatactcttaaatttcctatcaaaactcgctttcgcgatggttttcgtagtgtataaaatgttgaaaaatttgcaactaaatcccggcaggtcttaccacgattttacgttattttgaggccatttgccctaataacgcaaatattttcgatcgtgattaaaccatgtacatcccgccgttgacgtggagggtctcaccagtgatgtaacccgcttcgtcagaggctaaaaatgcaaccgcactggcgatttctttagggtcgccaagacgacccgccggaactgccgccagtgtacccgcacgctgctcatcggtcagcgcacgcgtcatgtccgtttcaataaagcccggagcaacaacgtttacagtaatcccgcgggacgcgacttcacgcgccagcgatttactgaaaccgatcagacctgctttcgccgcagcgtagttagcctgaccagcatttcccatggtaccaaccacagaaccaacagtgataatacgaccatgacgctttttcatcatagcgcgcattaccgcttttgacagacggaatacagatgacaggttggtttcgataatatcgttccactcgtcatctttcattcgcatcagaaggttgtcgcgagtgatcccggcattattgaccagaatatccacttcaccaaactctgcgcgaatattttccagaacagattcgatagatgctggttcggtcacattcagtaccagacctttaccgttcgcacccagatactcgctgatggcctgcgcgccattctcgctggttgctgtaccaatcaccttcgcgccgcgcgcaaccagtgtttcagcaattgcacgcccgataccgcggcttgcgccagtcaccagggcgatttttccttcaaaactcatggtattcctcttttattgcgagagtgccgctgacatcgcttccggctcgttaatcgccgaggctgtcagggtgtcaacaatacgtttcgtcagaccggtgaggactttccctgggccgacttcatacagatgctcaacgccctgagcggccataaactcaacggttttggtccactgtaccgggctgtagagctggcgaaccagtgcgtcgcggatagcttccggcgcggtttcgcatttcacatcgacgttgttcacaacggcaatcgtcggtgcgttaaacgtaattttttccagctcaaccgccagtttctcggcggctggcttcattaacgcacagtgggacggcacgctgaccggcagcggcagcgcgcgtttcgcgccagcagctttacaggcagcaccggcacgctcaaccgcttctttatgaccagcgataaccacctggcccggcgagttgaagttaaccggtgaaaccacctgcccttcagcagattcttcacacgcttttgcaatcgcagcatcatccagaccgatgatagcagacatgcctcctgtgccttctggcaccgcttcctgcatgaatttaccgcgcagttccaccagacgtacggcgtcagcaaacgcgatcacaccggcacagaccagcgctgagtattcacccagactatggcccgcgagcagcgctggcgctttaccgccctgctgctgccagacacgccacagcgcaacggacgctgtcagcagcgctggctgtgtctgccaggttttgttcagttcttcggccggaccctgctgggtcagcgcccataaatcataacccagtgcatcagaagcttcacggaaagtctcttcaatgaccggatagtgtgctgccatttcagacaacatcccaacggtttgagagccctgacccgggaacacaaaagcaaattgcgtcattttttattccttatcctagaaacgaaccagcgcggaaccccaggtgaacccgccaccgaaggcttcaagcaagaccagctggccccgtttgattcgcccgtcgcgtaccgcttcatcaaatgcgcacggtactgacgccgcagaggtgttgccgtgacgatccagcgtcaccacaacgttatccatcgacatgcccagctttttcgcggtcgcgctgatgatacgcaggttcgcctgatgcggcaccagccagtcgagcgcggagcgctcaaggttattcgcttccagcgtttcatcaacaatgtgcgcaagctcagtcaccgccaccttgaacacctcgttccctgccatggtcaggtaaatcgagttgtccggattaacgcgatcggcgttaggcagggtcaaaagctcaccgtagctgccatcagcatgcagatgcgtagagatgatacccggctcttcggactgccccagcagcaccgcgcccgcaccatcaccaaaaataatgatcgttccgcgatcggttggatcgcatgtacgcgccagcacgtcagcaccgatcaccagcgcatatttgacggctccggacttcacgtactgatcggcaacgctcagcgcataggtaaaacctgcgcacgcagcggcaacgtcaaacgccgggcaacctttaatgccgagcatattctgcacctggcatgccgcgcttgggaaagcatgtgtagcagacgtcgtggccaccacgatcaaaccgatctgttctttatcaatgcccgccatctcgatagcacgctgtgcggcttcgtaacccatggtggacacggtttcgtctggcgcggcgatacgacgttcacggatacctgtgcgcgtgacaatccactcgtcagacgtatctaccattttttccagatcggcgttggtacgcacttgttttggcaggtagctgccggtacctaaaatcttcgtatacatgtacgctcagtcacttttagctaatacagattccaggcgagcggcaatccgctgagggacttgtcgctgcaccgcctgcactgcctgttcaatggcgacagaaaatgctcgctgattggcggcgccatgactcttaatcacgatgccgcgcaatcctaacagacaggcgccattatactggtcggggttgaggtgactgaatcgccgcgtcaggctcttttgtaaccaacgcttcaataaaatcagccaccaggcgctttttttgccctctccctgtgatttcagcagagaaagaaacatccgcacgaccccttccatggtcttcaacgttacgtttccggtgaagccatcgcagaccagaacatccgttttacccgtcaacaactcattggcttcgagataaccaatatagttgatggagggaacctgtttgagcaattcagctgcttcgcgaatgctgtccaggcctttggtctcttcttcaccaatgttcagtaacgcaacacggggagtgttgatcccgaccacttcttctgccagcaccgatcccattacggcaaactgagccagcattgtactatcacaatcgacattcgcgcccaaatcgagcaccaccgtcttgcccttctgctgatgcggcaacaccgtcaccagcgccgggcgctcaataccgtcaatcggtttgagcaacaatttcgccagtcccatcagcgcgccggtattacccgcgctgacgcaagcctgggctcgtccttctttcaccagctccagcgctatccgcatcgagctgccgcggctattgcgaatcgcctgcgagggtcgggcatcactggcaataactgactgcgcaggaataatctgcagacgtgaacgttgttcaaagtcagcttttgcaagtaatggcgtgattgcgtcgggattgccgactaaaagaagagtgagttgcgaattagaattcagtgcctgcaatgctgcaggcactgtcacggaagggccaaaatctccccccatgacatctaacgccagggttagacgtgtcaaggtatcgtcgcagcctggttcggtaagttccccgtttgcacggggagctcctcactaagcctaatcacgctgacgcgtgattacttagtgataaccttgcggccgcggtagaaaccgtcagcggtgatgtggtgacgcaggtgtttctcaccagaagtcttgtctacagacaggctggtaactgcagtcagcgcgtcatgggaacgacgcatgccacgtttggaacgggttggtttattctgttgtacggccatggaccttactcctcaattacttacgctttaagctggctaatacggcaaatgggtttggtttttgcgcttcatcaggcagttccccaaagaccatgtccgcctcggacacttcacagtgttcagaatcatgcaccggaacgactggcaaggagaggatgatttcatcttcaaccagagccagaagatcgatttcaccgaattcgttaacctcaatcggctcatacgcttccgggagtgcttcagcctgttcgtcagaacgaaccggactgaaacaatacgttgtgtgaacatgctgtacaaacggtttcccgcaacgctgacactcgagcgttaccgtcacctttgcatcaccggttaacacggcgaggcgctggttgtcgatagcgaacgacatggagcattctacatcactatccacactgactacggattcggcaatacgctcagcctgatcggaagtatagataccttcgtaatcgaggcgtttttgagccgtacgaaccggatcaagagtcaggggtaattttaccttttgcatagggcgcgcatattaactttgtaacgtcatagagtcaaagaaaaaggcaaccagagctgccttttgccaattattcgcacacattgcggcctgtagtttaaaatggctggcatcgatacgctatatctggtgataaaaatatgccaaatctcgtccttgcttccacgtctccctaccgccgaatgctgctggaaaagcttgggatcctgtttgaatgcgctgctccagacgtggatgagacgccacagccgggcgagtcaccgcgccatctggtgacgcgtcttgctaaggagaaggcgcagtcgctggccgcacgctatccttcgcatttgattataggctccgatcaggtttgcgtgctggacggcgaaatcaccggcaagccgcatacagaggaaaatgcctgccagcagcttctgcgcgcgcgcggtactatcgtgaccttctatacgggcctcgctctctataacgccgcgtctggccatctgcaaacagagtgtgaaccgttcgacgtacacttccgccatctcagcgagcaagagattatggattatgtgcgtcgtgagcgtccgctgaactgcgcggggagctttaaaagtgaggggctggggattgcgctgttcgacaagctggacggtcgggatccgaaaaccctggtggggttaccgctgattgccttgtgtcagatgttaaggcgagaagagtgtaatccgctgacgatgtgaccttcgccgggtggcgctgcgcttacccggcctacaaaaccgtaggcccgtgcaagcgcagcgccgccgggcaaaatcagccgcgcagaaccttcaggcagcgtttcaactgctcatccagcggcgcttcaatacggatgacttcaccggtatttgggtgggtaaatttcagcgctgccgcatgcaggaacagacgcgatagccccgttcccgccagctgcttatcaaactcgcggtcgccatagcggtcatcaaacgcgatggggtgccctgcaaactgcgtatgtacgcggatctggtgggtacgaccggtcaccggactgcagcgcaccagcgtggcaaactcatagcgctcttcaaccttaaaccgcgtctcagacggtttcccttcctggctgacgcggacaatacgctcgccgctttgcagaatgttcttcagcagcggcgcctgcaccacttttacatgggattgccactggccgcgcaccagcgccaggtagtctttctgcatccctttttcacgcagctgttcatgcagggaacgcagcgcagaacgttttttcgctaccagcagcacgccagaggtgtcacggtcgagacggtgcaccagttcaaggaaacgcgcttccgggcgcagcgcgcggagcccttcaatcacaccgaagctcaggccgctaccgccatggactgccgttcctgacggtttattcagcaccagaatgtggtcatcttcgtaaaggatgacatcgctcagggccgccactttctgtagcttcggtgaaacggtctcttcttcacgctctgccacgcgcaccggcggaatgcgcacttcatcgcccgcctcgagtttgtactcgggcttcacgcgttttttgttcacccgcacttcgcccttacgcaggatgcggtaaatcatgctctttggcacccctttcaactgggtgcgcaagaagttatcgatacgttgccccgcttcatcttcggcgatggcaaccatttttacggctggagtctctgttttcatggttggcgattctaaatatcgtcagccattagcgccactcatttttctatgcttatatttacttttatccggcctgcgccccgtttcacgcaatcgatttggtggttattaaaccaatcaccaccttgaggtgaagaaactgtgagtaaccgggtgataattggtaaaagtcatcttgctataacccggcgagcagtggaataatgaggtcgttttccgcgttaaatccgggttttgtaaggatgtcgacggaatgaccaattttgtctgaccgatcatccacgcagcaatggcgtaagacgtattgatctttcaggcagttagcgggctgcgggttgcagtacttcccggtataaggattgttctctggagagttctacccaggcaattcccctgataattgcgctgtgtttccgtatgaaatacaggcaaccgacactctgcgcctcttaagcgagcgacaaccgtgaggttggcgacgtgaacagacacgaggccatcggttcataccccggaaagcgtcaccttgcccgcagctttgtcgtcaatgtaagaataacgagtaagttacgatgaaaagaatgttaatcaacgcaactcagcaagaagagttgcgtgtcgcccttgtggatgggcagcgcctgtacgatctggatatcgaaagtcctggacacgaacagaaaaaagcgaacatttacaaaggcaaaatcacccgcattgaaccaagccttgaagctgcatttgtcgattacggtgctgagcgtcatggtttcctccctctgaaagaaatcgcccgcgaatatttccctgcaaactacaacgcccatggccgcccaaacatcaaagatgttctgcgtgaaggtcaggaagttatcgttcagattgataaagaagagcgtggcaacaaaggtgccgcactgacaacctttatcagcctggctgggagctatctggtgctgatgccaaacaacccgcgtgcgggtggcatctcgcgccgtatcgaaggtgatgaccgtaccgagctgaaagaagcgctggcaagccttgaactgcctgacggcatggggcttatcgtgcgtaccgcgggcgtcgggaaatccgccgaagcgctgcagtgggacctcagcttccgtctgaagcactgggaagccatccagaaagcagcggaaagccgccctgctccgttcttgatccaccaggaaagcaacgtgatcgtgcgtgccttccgtgactacctgcgtcaggacatcggtgagattctgatcgataacccgaaagtgcttgagctggcgcgccagcacatcgccgcgctgggccgtccggatttcaccagcaaaattaagctctacaccggtgaaatcccgctgttcagccactatcagatcgaatcccagattgaatccgccttccagcgtgaagtgcgtctgccatccggcggttctatcgtcatcgataccactgaagcgctgaccgctatcgacatcaactccgctcgcgcaacgcgcggtggcgatatcgaagagaccgccttcaacactaaccttgaagccgctgatgaaatcgcccgccagctccgcctgcgcgacctgggtggtctgattgttatcgacttcatcgacatgacccctgttcgtcaccagcgtgcggtagaaaaccgtctgcgcgaagcggtgcgtcaggatcgtgcgcgtattcagattagccatatctcacgctttggcctgctggagatgtcccgtcagcgtctgagcccatcgctgggtgagtccagccatcacgtctgcccacgctgctccggcaccggcaccgtgcgtgataacgagtcgctgtccctctctatcctgcgtctgattgaagaagaagcgctgaaagagaataccaaagaggttcacgcgattgtgcctgtgccaattgcgtcctacctgttgaacgaaaaacgtgctgcggtcagtgccattgaagcgcgtcagggtggtgttcgctgcatcatcgtgccaaacgatcagatggaaaccccgcactaccacgtgctgcgtgtccgtaaaggcgaagagacgtcaacgctcagctacctgctgccgaagctgcacgaagaagagatggccctgccatctgatgacgagccagcagagcgtaagctgccagagcagcctgcgttagcgaccttcatcatgccagaagccccaccggaagccgccctggaaaaaccagcggccaaacctgcggcgcagaaaccagaagcgacggcagcgaaagcacagccagcgcagccgggtctgctgagccgcttcttcggcgcgctgaagaagatgtttgccggtgaggaagttcagccagagcagccgaaagaagagccaaaagcggccaagcctgaacgtcagcaggaccgccgtaagcgtcagaacaaccgccgcgaccgtaatgaccgtagcgatcgtaatgagcgcaacgagcgtcgtgacaaccgtgacaaccgtgacaaccgctctgacaataacgaaggccgtgagcaacgcgaagacaaccgtcgcaaccgtcgcgagaaacagcagcagaatgttgaagatcgtgaaattcgccagcaggcgggcgatgagtctgagaagagcaaacagcgtgacgaccagcagccgcgccgtgaacgcaaccgtcgccgtaacgacgagaaacgtcaggcacagcaggaagtcaaaaacctgaaccgcgaagagcctgttgaacagcaggacggcgagcaggaagaacgtactcaggtcatgccgcgccgtaagcagcgccagcttgctcagaaagtccgcttcgcctctgaagcaaccgaagagacagcaaacgttgcggttgaaactcgcgagagcgcaaccggtacgcagctggcaaaagttgacctgccagcggtcgttgataacaacattgagcaggatgaaaacggtgaaaaccgtgataacgccggtatgccgcgccgttcacgtcgttccccacgtcatctgcgcgtcagcggtcagcgccgtcgtcgctatcgtgacgagcggtacccgactcagtctccaatgccgctgaccgttgcctgtgcttcaccagaaatggcttccggcaaagtctggatccgctacccggttgctcgcccggagcaggttgttgaagaacagccggtaacggaagaggtcattgcacctgtagcagcggtagaagaggtcgtgactgaaacggcaaccgtggttgaacctcaggttgttgaaactgaagcacctcaggccgcggacgtcgaaaccacgcatccggaagtgattgccgcgccggttgatgccgcaccgcagcttattgctgaagaagatgtcgtggtggctgaggaaattgctgaagaggctgaacctgtagccgcggtagaagaagccgctgaaaccctcgtcgaaaccaccactgaagaggtcgttcaggacgttgagattcaggttgaaccggttgttgaagagccgaaagcgccagaagtgaagcctgagccggttgtttctgcgccagccgctgcccacgtagcgacagcaccaatgacccgcgccccggcgccggattacgtgcctgaagcgccgcgtcacagcgactgggttcgcccagccttcagcttcgaagggaaaggcgcagccggtggtcatagtgcaacgcatcaggcgactgcaccggcaacgcgtccacagtctgtcgaataacgacaaacgacactgaagtaaaaagccgacccttgggtcggcttttttatggctgctgaacaggctttctcatcccggtcacctccggcatgacctgccgcatcaactccagaaatcgccgcaagcgtgccggataataacgggaccagggatagaccagatgtaccggtagcgccgcgggctgccactcgggcagcaaatgcaccagccgcccttcccgaatatcgtcctgtaccgtccagctggataccacggccacgccaaggccggtaagtgccgtattgcgtgcgacatacaggctgtcggtgctgagccgtggcgtaatagcaatccgcgcggtggcggacgtggcatcgtgaaaaagctccacgtggcgctggtagaaagagctgatggctatccagggaaactgctgcaaatcctccggcgtattcaccgccgggaagcgggccagcagtgccggagaagccaccaccgagcgcggcacctccgccagcagtacggatacggttgccggatcgacctccacgcccacccgaatagcacagtcaaggttgtcgccgaggaaatccgccgaccgatcgttgagcatccactcaatcgaaagctgcggatagcgttgcaaaaattcggttacgggtttcagaagctgatcctgaccaaacgcgtgcggcgcccgcacccgcagcacgcctacaggctcatcttccgtctgccctacctcatcctccagcgccagccagctgtcaatcacccgacgggcgtgctgatagcagcgctcgccgtcatccgttagccgcgtcgtgtgggtggtgcgcaacaacaggcgcacgcccagcatggtttcaagcgactgcaaccgtcggcttaccgtggcctgggttgttgccagctgtcgcgccgccgctgagagcgaacccgcctcgacaatgcggacaaacgtccgcattagctctaccctgtctatacgctcaactcttttcatcgcattttcatttatacgttcaacgtataagcgttttaccaccgggcccgctaccgtcgcaaggcgtactgataaaaaatagcctcacacgatgaatgaggaacaacttatgaacacaacaacgactccccatgctgtaagccgctgggtgatctttatgctggctctgggggctggcttcagcgtggcatcaatctattacgcgcagcccctgctgccgctgatgggtgccgacctgcatttgagtattgaaggtatgggcctggtgccaacattaacgcaggcaggctacgcgcttggcatcctgttcctgcttcctctgggcgatcgccacgaccgcaggacgttaattttgatcaaaagcgcggcgctggcgctgtttcttctcggctgtagcctgaccgggcagatccattccctgctgctggcaagcctgcttatcggcatggccgccaccatggcacaggatatcgtccctgccgcggccatccttgcgccggaaggtaaacaggggaaaaccgtgggcacggtaatgaccgggctgctgatgggtatcttattatcaagaaccgtgagcggcgtggtgggcgaagcgtttggctggcgcgtcatgtaccagctggcagcggcgagcattgcgttcatcggggtaatgatgtggtttgtacttccccgttttgccattcactccacgctgagctaccccgcgctgatgcgctcgatggaacacctgtggcgtcgctacccggcgctgcgccgcgcggcgctggctcagggtttcctgtcgattgcctttagcgccttctggtcaacgcttgcggtcatgctgctggaacgctatcacctgggtagtgccgtcgcaggtggttttggtattgccggtgccgcgggtgcgttagctgccccactggcggggggtctggcggacaaactgggggcaggaaaagtcacgcagcttggtgccgttcttgtgaccgtctctttcgccctgatgttcctgatgcccgcgctgggcgttcatgggcagctgatgctgatcgccatctctgccgtcgggttcgacctgggcctgcagtccagcctggtcgcccatcagaacctggtgtacagccttgaaccgcaggcgcgtggtcgtctcaacgccctgctctttacggtcgtctttatcgggatggcgctggggtccgcgttaggcagcaatatctactcgctggctggctggacgggtgtggtcgcactggccaccatctgtggcgtcattgcgctggtcatccgtctgatagaaagcgcgcgtgtcgcctcagtaacggcagaagtcgcataaaaaaaatgcccaatccagacggattgggcagcaaaacatgcccagtttcaagacatgttctaagaggtcaagatgttatttgttcagctggaacagagacatgccctgcatatcgctaaacgctttataagacgcctgcaaggccgcctgctgcatggtgtaagaggaaatcgcttcgttccagtcgacatccaccaggtcgctcatctgcttggtctggcccagcgcgcggtcatcgcccagcgtatcgagtttttccagctcgttcatcttggtgcccacatccgcgacgaccgtcaggatattgttctgggagtttttgatgccgatttgcgcattggcaatcacctggctttgcgccgttgcagcagccggatcgttctcaatcggcgtcttcagcgacgcgatggcagaatccaggattttgaacatgttcgtctggccatatccaccgcccggcagctcttccgcattactggtaatgctttcgaaaatctgctgcccggtatggctaatggtcatatttcgcgccgtatcaacctgctgcgtgatggcttctgcgccgccgttataatccccggtcgccgcatcaaacggtgcgctctcggttttgtatcccgcaaagataaagcgaccattaccatccgtcgtgttggccaggttcataagctgatcgcggatcccctgaatatcggtcgccagagaaaggcggtcgtcatcgcttaatgtgccgttcgacgcataaacgagcttctcgcgcacgcttgagagcgcggtgttcacctgcgttaacacgttatcttccagcgagactttttgcgtggcgaaggtacgtgcaagcgcgaactggctgttttgcgactgcgattgtgacagaacgatggcctgcgacgcggcgataggatcgtccgaaggacggttaacgcgcttaccggtggacatctgctcaccgtagctcagccatctgctctgggaatcggtgatcccgcgcatgttctgctcatacatcatctgggtgctaatacgcattattcacctcaaccttaacgaatgttgataattgcatcgaagagcgtactggcagtctggagaacctgggcgtttgccaggtaatactgctgataacgctgcaaattgccatactcttcgtcgaggtttaccccagagatggtctgctgctgcttgattaactgcgtttccacattcgctttcgtctggctgctcaccttcagtgacgccgttgagctaccaactgtactgacaagagaggcatacgcatcgttaaaggttttattcccacccacaactttcgcgttttgaagatcaagcagtttctggccattacggttatcactttcgccgccgttctgcactgacgccatcgccagtttggactcgtcgctgatcgccagatccatgttcatgatgacgtcggaaaccggcttcacggtaaagctgtctttggtatttgccgtgccgctcacgttgacgttaagaccatcaaacgacaggttgccgctggcatccgggctcatcgtaaagctggttttgtctgatgtacgggtgatcgtccagtcagtgccgttgaactgcagcttatagtctgtcgcctggacctgtttgctgtccgtcacagaggccgtaacaaccgccgatccgccgttcttgctgttggacagcaccgccggagaaccaaagttgaacagcttaccgcccgcatcaccgttagcgtcaaagccagcctcatgctgcgtgttcatcgaatcggcaaaggcaagcgccatctggttcagggtgttacgagctttatccagatcttccgtgcggaaggtcagtaaaccgcccaaagaaccggtggtgatcatcttttccgggatctctacgttcccgaccacgtcatcgacataggccacggtggtacgagccggatcggcactcgacttcacggcagccagctggttggctttgctgccctgtaccaggctgtaaccgttgccgaaagagatgttaaatgtaccactatcctgaacagacacttccacgccgacgattttgttcagctcattgacgagctgatcgcgctggtcaagcagatcgttaggcgatgcgcccgcaccgacgccggtcagacgggaaatctgatcgttcagattggcaatctgtttggcatagttgttgatctgcgacacgctggttgaaatcgcggtattcacctgcgtatcctggtcacgaagatactgatcgttggttttgaactgattgaccagaccgcccgctttacccagcaccgtctgacgcgccgccggatcttccgcgttgctcaccagggtttgcagacttttgaagaagtcctgcagcgtggtggaaagcgagttggtggtatcggagagcacatcgtcgattttcgacatctgctgatagcgcgtcgtcaggccgctgctctgcgtctgcgcggcgcgcagctgattggtgatgaaggcgtcatactcacgctggacaccggagacatacaccccgttacccacccagccaccgccggtcagcgtgctgttagatgcgcccagcaccgtggtctggcgggtgtaacctgccacgttatagcttgaaatattattactgacggtattgagtgccgactgcgcagcactgaggccactcatggcgctgttaatcaaactggacatgggggttccttttatacgttcagacacgagtcctgatgaaggttatcggcaacctccaccgggacttgagaactttcagaacagattttcaatatctgtgctataggctttgctgaccttctcgcccatggatttcagctgctggatcatgctggtgagcttacgcgcatagttcgggtcggtcgcgtagcccgcgttttgcagcgcctgagcgccctgctccgccgtcgccgcctgcgtcacggcggtatagcgcggatttcggctcagcaggccaacataatcggacaaggcttccagatacgagctgtagacgcggaatttggctttcaccttaaccgccgcaccgttctcgtattcggtggtcgtgatctccgtggttggccccttccagctggaggtggccttcacgccgaagatgttgaagctcggctcgccgttttccttgcggatctggcgctgaccccagcccgactccagcgcggcctgcgccagaatcaggtgatgcggcacgccgctctgttcgctggcaaggcgcgcaggcagagaaagctgcgccaggaagtctttgctgtcaccggagagcggctcatcgccgctgcccgtggctttcggcatggctttacgcaccatttgcgtcagagcctggttctgatagctggtcaccgtttccaggtcgaacttcatcggtacctgctgcggctgatcctgaggctgaatgccctgcgcggcttcggtctgcttgacaatcatgtcagccagaccgaggcctttcccggcggtcatctgctgcgcaatctgctggtcatacatgctggtgtagagacgcgttgaatcactgctgaacatcccgtctttcggcagggtttcgcgcatgctcttcagcatcatctgtacaaacattccttccacctggcgggcgaccgggcggatattcgccgccgggtctttgcccgctttggttttcagttcgttgagcgactgggcgtcccaggcggcactggtcaacagtttgctatcggtcagcattaaatgatttccagtttggcgcgcaggcagcccgcgctttgcatcgattgcaggatggacatcagatccatcggcgttgcccccagggcgttcagggcgcgcaccacgctgttcaggttggcgcttgatcgcacgctctgtaaagacccaccgctctgacgtaaatcaatctgcgtttgcggggttaccaccgtctgaccaccgccaaacggcgtgtccggctggctgacgttagcggagcggttcaccgtcaccgacaggttcccctgcgccacggcacagctgtcgagcgacacttcccggttcatcactaccgagccggtacgggagttgatgatcaccttcgcatcctggaccggaacgttcacttccatattctggatatcggccagcatgcgcacctggttgctgctgccggtggaggtacggatctgcacggtgcgcgcatcgagtgccgtggcattaccgtagccacggctgcggttgatggtatcggcaatctgctgcgccatcgtgaagtcttcattattgagctgcaggttaatggtgttgcccgcgccaaactgggtcggcagttcacgctcaatgatcgccccgttggtaatccgtccgccgttgagctggttcacctgcacgctgcttccgcctgcggatgcaccggcaccgccgaccagaatgttaccctgcgccagcgcatacacctggctgtcgacgcccttcagcggggtcatcagcagcgtaccgccgcgcaggcttttggcgttacccattgaggagactaccacgtcaatggtctgtccctgacgcgcaaacgccgggtaggatgcggtgaccattactgccgccacgtttttcagctgcatgttagttcccgccggcacggtaatgccgagctgggaaagcatgttgttcagactttgggtggtaaagggggtctgggtcgtctggtcaccggtaccgtccagccccaccaccaggccatagccaatcagcgagttttcacgcacgccctgaacgctggtgagatcgcgaatacggtcagcctgggcaaacgttgccaccagcgcgagcgccacggcgaagatcgatttaaacatgggtcacctcgcttacatcggcgataagttaaggaagaagcgctgcagccaacccatattttgcgcttcattaatgtagccgttaccgacgtactcaatgcgcgcatccgccacctgggtggacggaacggtgttggtgccgctgatggtgcgagggttaaccacgcccgagaagcgaatgaattcagtgccctggttgatggcgatctgtttttcacccacaacgtgtaagttgccgttaaccagtacctggtcaaccgtgaccgtcagcgtgccgctgaaggtgttgctggcgttcgcgccacctttaccgttaaaggtgttgccgccagaggcatcgacatcagcacgcgcgttgccgaacagtccctgcaggtagcgcgggacggtatcgaagccaaaattcgttttgccatcgcggctggcgttcgccgacgagctcttgctcgcgctgacgttttcctgcagcacaatggtcaatgtatcgccgacgttacgcgggcggcgatcttcaaacagcggctgatagccgtaattaatcggctgcgcggtctggaaaatggagccgttgactactggcgcagggccaggaacgggttgggcagtcgtcgcaccctggaccaaaggtttagacgggatccaggcacacccgctgagggtgacggccagaacagtcagaatcggataacgaaacgccgcgtttttttgcattgccttcatcttcgaaaacagggagccggcgcggcgtttaccgcaccgggctacaccttagagttgcgtcagtttctgcagcatctggtcggtcgtcgacactgctttactgttaatttcatacgcgcgctgaacctggatcatattcaccagctcttccgccacgttcacgttggaggtttcaacatagccctgatacagcaggcccgcgccgttcaggcccggggtgctctcatttggcgtaccggaggattgcgtctcggtgtagaggttctcaccaatgctttccagaccggtatcgttcatgaaggtggtcaggttgagctgcccaacctgaaccggcgcggcctgcccctgctgggttacgctgaccacaccgtcacgtccgatggtaatgctcagggcgttcgccgggatggtaatcgcaggctgaacctggaaaccgcccgccgtcaccagctggccgttctgatcgacctggaacgagccgtcgcgagtgtaggcagaagtcccgtcaggcagctgcacctggaagaagccctggcctttgatcgccacgtctttgctgttgttggtctgagacaggttgccctggctgtgcagacgctcggtcgccaccggacgaacaccggtaccgatctgcaggcccgatggcagcgtcgtctgttcagaagactgcgcgcccggctggcggatggtttgataaagcaaatcttcgaaaacggcgcgttgacgcttgaaaccattggtgctcacgtttgccaggttgttggcaatcacgtccatattggtttgctgggcgtccaggccagttttcgcgatccataaagaactgatcataaggaatcctgttagctcatagccagaagttggttagccttgcccgcgttttcatcgacgctgctgatgatcttcatctgcatttcaaaacgacgggcgctggcgatcatgtcggtcatggcttcgaccggcttgacgttactgccttccagaacaccggacatcacgcggatgctcggatcggcctgtaaggtggcaccccgcgtcgcctgcgccgcctgggtcagacggaacatgccgtcgtcgccacgctgcacctctttgccttccgccttaaccagcttcagacgaccgacgggcgcaacggtattggccgggtcgccagggttgagcgccgaaatggtgccgtccgcagcgatagtcagctcagagccttccggtacggtcagcggacccgcttcccccatcaccggatgcccctgaatcgtcagttggcccgtcgcgctcacctggatgttcccgttacgggtatagccttcgctaccgtccgccgtttgcaccgccagccagccgtcctgctgcagagccacgtccagcgggcgtgaggtgtaatccatctgccctggcgtcatatcggcgccaggggttgatgccgtcaccagcgtacgggtcggcagggaaagcccttctaccggcaccgcgcgcagcgcattaagctgcgcgcgaaagcccggcgttgaggcgtttgccaggttgctggcggtaacggcctgctgattgagcgtctgacttgccgcgcccatcgcggtatatattgcgtgatccattgcgctttcctgttagccgcttaacgcaggttaaccagcgtgttgaggatctgatcctgggttttgatggtctgcgcgttcgactgatagttacgctgcgcgacgatcatgttcaccagctctttactcagatcgacgttagaggcttccagcgcaccgttggtcagcgtgccgaagttaccgcttccggctgtacccagcagcgccacgccggaggactgggtggcagaccagacgttgtcgccttccgatttcagaccttcgttgttggcgaagtttgccagcacgatctggcccagaacctgggtctgctcattggaatagttaccgaccacagtgccgtcgtcattgatttggtagctcaccaggtcgcctggtttaaaaccattctggctggtcgcgacgatattgttcgcaccggtgttctgctgcatggagttagcaaaactcatggcgaaggtcgctggcgtcgcacctgggatggtcgcggtagtgatgttgatatttccaccaccggtcagcgtaccgttattatcgaaggtcagcgtggtggcgagtgccgccgtgctgcctgcgacgctaccgtcctgggcatacactttccaggagttagccggggtcgcatctttgacataaaacaggttcatgttgtgcgcattaccctggctatcaaagacggtcaccgtaccttttttgttgtacgtgtccgggttagccggatcaaaggcggtggtcggcgcggtatcggtggaattcaggttaatctgctgggaagccgtggtggtggacttcgcggccatcagcgtggttgggatattaatgacctgtgggttcgccccagtctgaaccgttgatggcgtcccggcaaccggataaccggttaactgcatcccctgcatgttcaccaggttacggttttcatccagcttgaactggccgttacggctgtagaacacagagccgttggagtcgaccatacggaagaaaccgttctggctgatggcgacgtccaggccacgaccggtgttggtggtggtgccgtcgctaaagtcctgcgtgatgcccgcaactttcacgcccaggccgactttggagccggcaaacatgtctgcaaaggaagcagaaccggatttaaaaccataggtcgcggagttggcgatgttgttgccaatgacgtccaggttggtggccgcagcattcaggccgctgaccgcttgagaaaaggccatgacttactcctgataagtgttaaggcttagataatctgccgaacttcgtcgagtgtggtggaaccagaggttcccaaatccagtttgttgccgtcgcttcctttaatcacgccctggaccagcgcgaactgcagcggctgcgccaccagctgggtcgtcccgttgctggcgctgatcgcgactttgtaagcaccgtttggcgctttcgtgccgtcggtcaggctgccatcccacgtaaaggtgtgaacgcccgccttcagctcgccgatatcaatggtgcgcacaaccgtgccgttgctgtcggtaatggttgcggtaactttctccgccgcctgctgcagctcaacgccaaacggcgtggtcgtcgttgtggtgttgccttcggtagtgctggtgcctgccagaatcgtggttcccgggatcatcaccccgtggccaatcaggcttgccgcctgcagagactgggtgctattaatctgtccagagacggaaccaagggtggtgttgagtttctcaatgccgctaacggtgctgatctgcgcaagctgcgtggtcagttcgttgttctgcatcgggttagtgggatcctggttcttaagctgcgccaccagcagcgtcagaaagctgccctgaagatcggcggcgttactccccgtcagggagttagaacccgtcgtactctttgtgttgttaacacccgagttcgtcggatcattcacatttacggcgatggacatgcatgtctcctttactggccgagagtgagtgttttgagcatcatgctcttcacggtattaagcacttcgacgttggcctggtagctacgggaagccgacatggagttcaccatctcacccaccacatccacgtttggcatcttcacgtatccgctggcatccgccagtgggttacccggctcatacaccagtctgtccggggcctggctctccaccacatccgagaccttcacgccgcccgtcgccgcgcctggcgcagcatcgacctgaaagacaacctgtttggcacgataaggctggccgtcgggtccggtgacgctgtcggcgttcgccaggttactggcggccacgttcaggcgcttggactgtgcggttaatgccgaaccggcgatatcaaaaatattcagcaaggccatctatcagttccccccctgcaggacgttcatcatgcctttgatttgtccgccgagtacggtcagacccgtctggtatttcaggctgttgtcggcaaactgggtacgctcccggtccatatccacggtgttaccgtcgagtgagggctgatcgggaatgcgataaagtaaatcggtcgctggcgcggtcatcgcctgagcaggaatatggcgagaggatgtcatggcaagtgcaacacccgttccttcggcacgtccacgctccatcacctttttgagttcactggaaaaatcaatatcgcgcgcctgataccccggggtatcggcgttagcgatattggcggctaaaatctcctgccgctgggcgcgtaagttgagcgcttcctgctgaaaacgtaacgcggcgtcgagtttatcgagcatgtctcctccgctgatggcaaaatttcagttcacagcttaaatctcacccggtctcccctatcgacggaataagcgcaaaatgcgtcgctatttattccgttgatgcaaaaccacagcaggtagaattcgttcaactctggaaacggtggaacttgcgatgcaaacgttaaaacgtggtctggtggcggcgctcttgctgttaagccctctggcgcaggctgaagggttacaggatcggctaacggctttttttgccgaaaaactggcaggctttagcgatgacgtgaccgttaccgtgcgcacgccaccgaatctgtacccgacgtgcgacctgccgtccttcagcgtggtagggtttacaaagctctgggggaatgtgaacgtgctggcacgctgcgccaacgaaaaacgctatttacaggttgccgttcaggcgacgggcaattatgttgtcgccgccgtgcccattgcgcgcggcagcgtactgcagacaaacagcgtgaccttgaagcgcggccgtctggatcagctgccgccacgcaccatgctggatattaaccaggctcaggacgccgtcagcctgcgcgacgtcgcgccaggccagccgatacagatctccatgctgcgtcaggcatggcgggtaaaagcaggccaacaggtgatggtggtggccaacggagatggctttagcatcaacagtgaagggaaagcgttgaacaatgccgcggtggcgcaaaacgcccgcgtcagaatgtcctcaggccaggtggtgagcggaaccgtcgatgctgatgggaatattctgattaacctataatctttttaaagatttcgcggcgcgtgccgataaatattccactaatgatgatgtcaggcgcaaacgccgcgaaccctcgatgaggacaacactatgagcattgatcgtacatcagccctgaagccggtaagcgctgtacaacctcgcgaaacgaatgacgcaacggcgcagaaaacgcgtctggagaaaccgtcaacgtccaacagcaccagcgtgaccctgagcgacgcgcaggcaaaactgatgcagccgggcagcaacgatatcaatatggaacgtgttgaagcgctgaaaacggctattcgtaacggtgagctgaaaatggataccagcaagatcgctgacgccctgattcaggaagcacagagtttcttacagagtaactaaccgtatgagtcgactgtcagaaatactggatcaaatgacggttgtcctgaacgacctgaaaacggtaatggacgctgaacagcagcatctctcttccggtcacatcaacggcagcgcgctgcagcgtattactgaagacaaaagttcgcttctggcaacgctggattatctggagcagcagcgacgcgctgagcaagatcctaagcgcagcgccaatgacgatattattgagcgctggcagaccattactgaaaaaacccagcacctgcgcgatcttaaccagcataacggctggctactggaagggcagattgagcgtaatcagcaggcgcttgaggtgttgaaaccgcataaagaaaccggtctgtacggtgcggatggtcagacggcgacggcgcgtattgcaggtgtgaaaaagatttcgatttgacgcataagcgactaatcatgcagtggggagcaccatgaggtgaactccccttttggcgtttatgccgtccggcgggcaaactctttgactttgaaacccagcaccgcgagcgtggcaaagtacgccaccacaccaacgcacaccacggccatcaggcgcatcaggcgataaggcatcgtgcccagggaccactccggcatcacgtgcatcatgccaagcagcgcggcagacatcaccagtaccgcaacgatcagacgcatcaggaaactgccccaacccggctgcggcgtgaaaatatcctgcttgcgcagctgccagtacagcagcccggcattcagacaggccgccagaccaatcgataatgacaggccggcatgtttcagcggaccaataaacgccaggttcatcagctgcgtcataatcagcgtcacgatggcaatttttaccggcgttttaatgtcctgacgcgagtaaaagcccggcgccagcactttcaccacgatcagccccatcagtcccaccgagtaggcaatcagcgcgcgctgggtcatggcggcatcgaaggcagtgaatttcccgtactggaagagcgacaccgtcagcggtttggccagaatacccagcgccaccgcgcttggcagagccagcaggaagcagagacgcaggccccagtccatcaggcggcaatactcatcatgattgccgctggcaaaacttttcgacagcgacggcagcaggatggtccccagcgccacgcccagcaccccggacggaaactccatcaggcggtcggcgtagtacatccaggaaaccgagccggacaccaggaacgaggcaaagatggtgttgataatcagcgagatctggctgacggagacgccgagaatggcgggccccatctgcttgatgacgcgcatcgccccggcatctttgaggttgatgcgcggcagcaccagcatgccgatttttttcaggtgcggcagctgatacgccagctgcagcacgccgccgacggtgaccgcccaggccagcgccagcaccggcgggttgaagtgcggggcggcgaacagggcaaagccgatcatgctgacgttaagaaacgtcggcgcaaacgccggtacagagaagcggttccaggtattgaggatcgcccccaccagcgaggccagcgagatcagcagaatataggggaaagtaatgcgcaacagctgcgaggtcagggcaaacttgtcggccgtatcggcaaagccgggcgcggtcaccataatcacccagggcgcggccagcatcccgaggacggtcaccaccgccagcgccagcgtcagcaggccggagacataagacacaaagacgcgcgtggcgtcctcgccctgcttgcttttatattctgccaggatcgggacgaatgcctgggaaaacgccccctccgcaaaaatacgacgcagcaggttcggtaatttgaacgcgacgaaaaaggcgtccgtggccatccctgcaccaaatacccttgccacaatggcgtcgcgcgcaaaacccagcacgcgggaaaacatggtcatcgagctgacggccgccagcgattttaataagttcattaacgtgaatttccagaaccatacggatttccaggacgggcaagcgtaagcgccacccggcaaagcctacaagcggcgcttagtctacccggatttcaacgaattactatccgcagatgttacagcgagttattcactcatggcctcgcgccagagcctttccacaatgcgctgcgccatgatggcctgctcgccggacgtttcaggaaccgtctgattttgcacgcaggtgatgaagtggcgggcgcaaccggcaaacccgcgctgttcaagcgtgctctgccagccaggcgcggggagcgtcaccacgccgctgcccttctcttcccgccattcacgcatgtcggtaatgtcgtacaacgcgccgtcggtgacggcctggacgcattctcgctggctgccggcacgacgatgcatgcttgtcgtgatctgcagatggtcaatcgcgaaatggtgttcggcgtagaccatttcaccctgctcgttcgtgagcagcgtgccactttgcagctgcgcgttgctgccggcgagccacagcgccgtatccacaacgtggagataatcatccagcaacgtgaagcgcaaatcgttcggcccgatgctgtccgtgcggtgcttatccatccgcagcgaggcaaacgtgcccgactgtgccttaagctgctggtaaaggggcgcgaagcggcggttgaagccgaccatcagcgtcagttttttacgcgccgccagctcaatcaggcgttccgcgtccggaacattttccgccagcggtttatccacgcaaacgtgaacgcccgcattgagcagctcgctcacgacctgatagtgggtagaggttgaggtatgcacaaagaccgcatcgcactcgcgggtcagatcctgaagcgatgccgcatacggcatacggcatacgccaggtttcgcagatccgctcggccttctcgcgcgtgggtgaccatgccccttgcagcgtccagtccgtcgctgcccccagaaccggcagccaggctttttgtgcaataccgcccagccctactacgccaatgcgtaattttttcaccgtcagtctcccaaatgtgccagcagggcatccagacgctgtttcagcccggcgacctcgtcttccagcgccgctacgcgggcaaccaaatcatcatctacggccgttatgtcagttgcgctggatttaactgaactatcaacgtcaccgctgaacaggtgcatatagcggctttcacgcttgcccggctcgcgcgccagacgcactacgtaaggaccgtcttcacgcgcggccagcccttcgagggtctgctcgacctcctgcatatcgctgaactcatgcatacgggaagcgcgcgtgcgcagttctcccggcgtttgcgccccgcgcagcaacagcgtggtgatgaccgccacttccgcactgctcagcttcaggtcaccaaattcggagttacagaagcgctgttcgtatttggtcacgcggttgccgaagccgctgacggtgcgcagatagtggcgtttgaccagcgcatccagcacgtcctgaacctcatgctcgctgaggttcatcaccggctcgcggttggttttctggttgcaggccatggtcacggcgttgacggacagcggatactgctccggcgtggtgacctgtttttcgagtaagcacccaatcacgcgcgcttctgtaccgtttagctgatacttcatcttttctccttaacgacctgcagtccagtcccgggtggttaatgccgtcagaacgtggtcgcgccactctccgtctatcagcagatagtctttggcgtacccctctttctcgaaccctaaacgcgccagcagatttccgctgcgctggttatgcggcatatagttcgccataatgcgatgaatgtgctgggtgcgttgcatatagcggatcgctaccgtcagcgcctcgtacatcagcccctgcccctgccacttctggccgatggagtagcccaggtagcaggcgtgaaacgatccccgcaccacgtttgaaaaattggcgatcccgataatctctttctcttcaggatccagcagcgcgaaataaaacgcgctgccctgcttgtgaaattccgtaatcatgctgaggcgcgcctgccagccggaagggtaacaatggctctcatcccgaacgggttcccagggttttaaaaactggcgattctcggcgtaataatccgccagacgccaggcatcacgctcatgcaccagacgaacgaccagcctgtccgttgtcagacgcacttttggcacattactgcgatagccaaacatcgataccactccttcccgtcacttcagcttgcccattagctttactatacctgcgcctgcgccgtctgtgaaaacagtgacataccattttcacctcttttcacatttttcgatgagaactctctatcaaagcacccttttgataaaaaaatattgtcacgtgcaggggtgggaaaaaacgcggcgacaccgcagaatgttagcgtgctcaccatcttattttccctggagggaaaatgtcccgcgtatcacaggccaggagcctgggtaaatatttcctgctcgtcgataacatgctggtcgtgctcggcttttttgtcgtttttccgcttatttcgatccgctttgtcgatcagatgggctgggcggcattaatggtcggcattgccctggggctacgccagtttgtccagcagggcctgggcgtctttggcggggccattgccgaccgctttggcgcgaaaccgatgatcgtcaccggtatgctgctgcgcgcggcagggtttgccacgatggcggtcgcccaggagccctggctgctctggttctcctgtttcctctccggtatcgggggcacgctgttcgatccgccccgcaccgcgctggtggtaaagctgattcgcccgcagcaccgcggccgtttcttctcgattctgatgatgcaggacagtgccggggcggttatcggcgccctgctgggaagctggctgctgcagtatgatttccgtctggtctgcgcggctggggcggtgctctttatgctgtgcgcgctgtttaatggcctgttcctgccggcgtggaaactgtcaacggtgaaagcgccggttcgggaagggctgggccgcgtcctgcgcgacagacgttttgtcacctatgtgttgaccctgacgggatattacatgctggccgtgcaggtcatgctgatgctgccgatcatggttaacgacattgcaggtacccctgcggcggtgaaatggatgtacgccatcgaagcctgcctgtcgttaacgctcctctatccgattgcccgctggagcgagcggcgttttcgcctggagcatcgcctgatggccgggctgttcctgatgacgctgagcatgatgccgatcggcctggtgaacacgctccagcagctgtttacgctgatttgcacgttctatattggctcgatcatcgccgagcctgcccgcgaaacgctgagcgcctcgcttgcggatgcgcgtgcacgcggcagctatatggggttcagccgactggggctggcgcttggcggggcattaggttacgctggcggcggctggttgtttgatgctggcaaagcgttaaatcaacctgaacttccgtggatgatgctgggcgtggtgggctttatgacgctactcgccctgtggtggcagttcagccagaaacgcagcgcgagcggcatgctcgagcctggcgcgtagcctttccctcgggcgggagcccttcccgccccacttctcagttttttctgctggtttctgcccattcacgctgacatactggcgtaacaggacagaagcgccgatttttcgttgaggaacactatgaagaaaattgtcttagccgcggcattgattgtcagcggcctgctggttggctgtaaccagctcacgcaatacaccgtcagtgaacaggaaattaatcaggcgctggaaaaacataccaatttctcgaaagacattggcgtaccgggtcttgccgatgcgcatatcgtgctcacaaacctcaccagtcaaatcggacgtgaagagccaaacaaagtcaccctggccggtgatgcggacctcgatatgtcctccctctttggcaatcagaaagccaacatcaagctcaagctgaaggcactgccagttttcaacaaagagaaaggggcgattttcctgcaggagatggaagtggtcgacgcgaaggtgtctccggacaagatggcgccggttctgcaaaccctgatgccctatctgaatcagtcgctgcggaattactttaaccagcagcccgcgtacgtcttaagcgaagacaaaagcaagggtgaagctatggcgaaaaaatatgcaaaaggcatagaggtgaaaccgggcgaaattatcattcctttcaccgattaacctgaagggcgctgcggcgccctttttttcacggaaaagtgtgcaaacgaaaacgtttccgcttatgatttgtgtccggcaaaaacagccatccttatgactgattcctgacaagccggagcttccatgactgcacaaccccaggttcttaaaatccgccgccctgacgactggcatatccatctgcgtgatggcgatatgctgaaaaccgtcgtgccttataccagcgaaatttatggccgcgcgattgtcatgcctaacctggtgccaccagtcaccaccgtcgatgccgcgatagcctatcgccagcgcattctcgacgccgttcctgcgggacacgattttaccccgttgatgacctgctatctgaccgattcactggatccgaacgaagtggagcgcgggtttaacgaaggcgtctttacggcagcgaaactctacccggcgaatgccaccaccaactccagccacggcgtcaccagcattgatgccattatgccggtgctggagcgcatgcagaaactgggtatgccgctgctggttcacggcgaagtaacgcatgccgagattgatatcttcgaccgcgaagcccgttttatcgagaccgtgatggagcctttgcgccagcgcctgcccgcgctgaaggtggtcttcgagcatatcaccaccaaagacgcggcagagtacgtgcgtgacggcaacgatcttatcgccgccaccattacgccacagcacctgatgtttaaccgtaaccacatgctggtgggcggggtgcgccctcacctctactgcctgcctattcttaagcgcaacatccaccagcaggcgctgcgcgagctggtcgccagcgggttctcccgcgcgttcctcggtaccgattccgcgcctcacgcccgccatcgtaaagaggcgagctgcggctgcgcgggctgcttcaacgccccaacggcgcttgccagctacgcaaccgtgtttgaagagatgaacgcgctggaacatttcgaagcattctgctcccttaacggcccgcgcttctacggcctgccggtcaacgacaccttcatcgaactggagcgtaaagcgagccacgttgaggagtccattgccctgacggacgacacgctgatccccttcctggcgggtgaaaccgtaagctggacggtaaaacgttaaaaaatcagtgccccttgttgtcaaactgataatatacctgtataaataaacagtatattacacagggggcatttatgcgtattgaagtcaccatagccaaaactaccgttctgcctgccggcgcgcttgatgcactggcaggcgaattatcccgtcgtattaacaacacctttcccgacaacgcgggtgccgtcacggtgcgttacgccgcggcgaacaacctctccgtcattggcgccgcaaaagaagataaagatcgcatcagcgaaatcctccaggaaacgtgggaaagcgctgacgactggttcatcacggattaatactgctccctcattgtgtttttttgccgggtcgccccggcttttttttgcctcataatcctgtaagttcaaaataattcggcatcttctttaaaaatcgtgaacgagatggtgttttattgttcgaacaatcctaaaaagtagaaaaatgtgttgccacctgtttatttttcccttcggaacccttattacttggtatactgaagttgctttcagaaaaacatgcattgaacctcaaagccgttgtcttctaacacgcattaagggggttataatggaaaagaatagtgaagtcatccagacccacccacttgttggctgggatatcagtaccgtagatagctacgatgcgctgatgctgcgtttgcactaccagaccccaaatcaactcaaccgtgaagaagcggaagttggacagacgctgtggctaacaacagacgtcgcccgtcagtttatttctattttagaagcaggtattgcaaaaatagaatctggcgactaccaggaaaatgagtataaacggcactaagcttatgcccacttttctctctacaggcaccctcgcggtgccttatttatttctcccttgtctaaccccgcgttgttaattactctgctaacaaaacatcagtttatgagatgcatatgagatacgacttaatcattattggcagcggctccgtaggatctgccgcaggctattacgcaacacaggctggtctgaaggttctgatgatcgatagccatctgcctcctcatgcggaaggcagccatcatggcgatacccgcctcatccgccatgcgtacggtgaaggtgaacgctacgttccgctggtgcttcgcgcccagacgctgtgggatgaactggcgaaacagaccgaagatcgtattttcgagcgtacgggcgtcatcaacctgggtccggcacattctgcgtttctcgctggcgtcgaacgcagcgcgaaagcgtttaatctggacgttgagaagctggatgcgacgggcattaccgcacgctggcccgaaattaccgtcccggacgattatattggcctctttgaagcccactccggggtactccattgcgaaacggcgatcaaaacctggatcgagcttgctgcgaaggcaggctgtgcgcagctgttcaactgtccgctagaggccatcacccatgatgataatggcgtcacggtcaccactattgacggcgattattcagcgtcccgcctgctggtcagcgcaggtacctgggttacccgcctgctgcccgatctgccgatccagccggtgcgcaaggtcttctcctggttccagtcggatggtcgttacagcgcccagaataaattcccggccttcaccggcgaattacccaacggcgaccagttctacggcttcccgtcagaaaaagacgcgctgaaaatcggtaaacacaacggcggccaggcgatctcctcccctgaagagcgtaaacctttcggcgccttcccacaggatggttcagaggccttctcgttcctgcgcactattcttccgggcattggcggcttgctgtatggcgcggcctgtacctacgacaatacgccggatgaagactttatcattgatacgctgccggggcatgacaacaccctgctcatcaccggactgagcggccacggctttaagtttgcttccgttctgggtgaaatcgccgcgcagtttgcccagggcattgcgccgcagtttgatctgacgcccttctccctctcgcgttttagcggataatccgcacgggctccggaggtcacggggctcgcttcattcacaccgcatgttggggcgttatgcgcaagatcgttagctttctgatgaataatattcgcgagcattttatgctctatctcttattgtgggcgctgctggccattattgattttgtttacattgtattttactgaaaagccttactgacaataattgacgttaatttatctttattgaaacttataatttcatcttgcacgaagagattgaattagcgttagcgatccttttcaaaattgctgaaataaataaaataaaaatcaatagacaattatttcagttgcaatatcccgccttcccgttcatttttacccttcggttaatttgaaaatggacattctgatgcaatggcgtaactcctcccggcgctacggaataatatccataggtttgcactggatatttgctcttgccgtctacggtatgtttggacttgggctctggatggtcacgctcagctattacgatggctggtatcaccaggcgccggaattgcataaaagtattggtgtcctgctgatgctggggctggttttccgcgtgatctggcggcacatttccccaccgcccgccgcgcaaaagactcacagcaaatttacccgcgtcagtgcagtcgccgcgcatattgccctttatgcgctgctgtttgccatcctgattagcggctatcttatttcgacggctgacggtaagccgattaacgtttttggcctgttcgaggttccggcaacccttagcgatgccggcgctcaggccgacacggcgggggttgttcacctctggctcgcctggagcgtggtgattctgtccgtggtgcacgggcttgccgcccttaaacaccattttattgataaagacgatacgctaaagcgcatgcttggccgctcgtcagttgactctggagcataaaatgaaaaaacacctgctgggtatcgcactgggttctctgttattcaccgccggctccgccgtggcggcggattataaaattgataaagagggccagcacgctttcgtcaatttccgtattcagcacctgggatatagctggctgtacggcacctttaaggattttgacggcacattcacctttgacgaaaaaaatcccgcagccgataaagtcaatgtgaccattaatacaaacagcgtcgacacgaaccacgcagagcgcgataaacacctgcgcagtggggaattcctcaacgtcgcgaaattcccgcaggcgaccttcacttctactgaggtgaagaaagagggtgataagctgaatattaccggcaacctgacgcttaacggcgtaaccaaaccggtcacgcttgatgcgaaattactgggccagggtgacgatccgtggggcggtaaacgcgcaggcttcgaagcggcagggaaaattcacctgaaagattttaatatcacaacggatttaggcccggcgtctcaggacgtggagctgattatttccgttgaaggtgtacagcagaaatcataataacgtcgcccggcaggcttttgccgtgccgggcattattatcattccgggtcagggatacccagtttggtattcagacgaccgcgagatttattgaaaatcttgttgccgttttcacgtcctgcgcgacggcgacgctgctcttcttccggcaggatgctctcttcactgcacagctcgctacagcaaccgttaaacttctcggcacaggccgggcactgaatgaacagcagatgacaaccgtcgtttttgcagttggtgtgggtatcgcacggcgcgccgcactggtggcactgggcgatgacgtcatccgaaatacgttcacccatacgctcgtcaaagacaaagtttttcccgataaagcgtaccggcagcccctgttcacgggcgcggcgagcgtactcaataatgccgccttcaatgtgccagactttattgaagccgttgtgcttcatccacgcgctggctttctcacagcggataccgccggtgcagtacataacgatctttttatctttatgctcctgcatcatctcaaccgctttcggcaactgctcgcggaaggtatccgccggaatctccatcgcattctcgaaatgccccacttcatactcatagtggttacgcatatcgatgaacacggcatccggatcgtccagcatcgcattcacttccgccgccttcagatattcaccgacgtccgccgggttaaactccggatcgtcgataccgtccgccacgatgcgttcacgcaccttcatgcgcagcacccagaaggatttcccgtcatcatccagggcaatgttcaggcgtaagccgttaagggccgggtcaaattgataaagtacgtcgcggaaggcgctgactttgctttccggtacgctaatctgcgcgttgatgccttcacgggcaaggtagacgcggccgaagacgttcagcgccgtgaacgcctgataaagcgcatctcgggtcgcctgcggatcgtcgatcgtgaagtatttatagaatgagatggttgtgcgcggttcggtttcagccaacatacgcgcttttaacatctcgttcgaaacgcggttgtgtaacactggcatggtgtacagtcctggagtcgttagagagaatgaaaaatcggtcggcatcatatagcaaacaaaaccaatttacatccacacaatttacgctacatttcacacaccctgattaatcaggattaacaattgctgtattcgtgcacgcttcgaaagcagatattttggctacgcctcaaaaaatgagacactagcgaaacaggacgtttgaacacaggaaagacatgacccagttaccaaaatttactgccgcccttttgcatccccgctattggttgacctggcttggcatcggctttttatggcttctggtacagcttccctaccctgttatttttcggttgggtaaatttctgggccgtttcgcacaactattcatgaagcgtcgcgccagaatcgcgtaccgcaaccttgagctgtgttttccgcagatgagcgactcagagcgtcacaatatggtcgcgaagaacttcgaatccgttgggatgggccttatggaaaccggcatggcgtggttctggccggacaaacgcatggcccgctggagcgaggtaacgggaaccggcatggatcctgtacatacgcttcaggccaaccagacgggcgttctgctgatcggcgtccattttctgacgctggaaatcggggcgcgtatgttcggcatgcaggcgcccggcattggcgtttatcgccctaacgataacccggtcatcgatttaatccagaccaatggccgcatgcgttccaacaaaagcatgatcgaccgtaaagatcttaagggaatgatccgtgcgctgaaatccggcgaagtggtctggtatgcccccgaccacgactatggcccacaggccagcgtttttgtccccttcttcgctgttgaagaggccgccacaaccaccggtacctggatgctggcgcggatgtccaaagccgccatcgtaccctttgttccccgccgcaagcctgacggttcgggctacgagttgatgatgctggaaccggaactcgcgccgccgcttgacgatgcagaaaccaccgcgcgctggatgaacggtatcgtagagaaatgcatcatgctcgcacccgagcagtacatgtggttgcaccgccgctttaaaacgcggccaaaaggcacgccgtcccgctattgattttcaggatgcgatcctcagggtcgcatcctgttttagctttaaaagctccccctcattgcggcaatcataacccaggcgcataattagcaggcttattacttcttgcttcaggtgctcagcacctcattatgcggattgttatgtcaccttcagatgcccccataaactggaagcgtaacctcacggttgcgtggcttggctgttttctcaccggcgcggcgtttagcctggtcatgccttttctgccgctctatgttgaacagctgggcgtgacgggccatagcgcgctcaatatgtggtccggcctggtattcagcatcacgttcctgttctccgcgatagcctcgcccttctggggcggccttgccgaccgcaagggccgtaaaatcatgctgctgcgctcggcgctggggatggccattatcatggcgctgatgggcgtggcgcagaacgtctggcagttcctgattttgcgcgcgttgctgggtttgctgggtggatttattcccaatgccaatgccctgattgccacgcaaattcctcgccataagagcggctgggcgctgggcacactctcaaccggcggtgtaagcggtgccctgcttggtccactggccggcggactcatggccgatagctatggcttgcgtccggtgttctttatcaccgcctgcgtgctgttcctgtgctttgttgtcaccctgctctgtattcgggaaaacttcacccccgttgcgaagaaagagatgctacacgccagggaggtgctgacctcgcttaaaaatcccagactggtgctgagcctgttcgtgacgaccctgattattcaggtcgcaaccggatcgattgcccctatcctcacgctgtacatccgcgatctggcgggcaacgtcagcaatatcgcgtttattagcgggctgattgcgtccgtgcccggggtggcggcgctgcttagcgcgccgaggctggggaaactgggggaccgcgtcggtccggaaaaaattctgatctgtgcgctggtgatctccgtcctgctgctgatccccatgtcgatggtgcactctccgtggcagctgggcttacttcgctttttgcttggtgccgcagacggggccttgctgcccgccgtacagaccctgctggtttacaactccacgaaccagattgccgggcggatcttcagctataaccagtcatttcgcgacatcggtaacgtcaccggaccgcttctcggggcgagcatctccgccagcttcggttttcgcgccgtctttatcgtgacggcgggggtggtactgtttaatgcaatttattcgtggttcagtttatcccgcgcgctacggccagtggcggaataagacgaacgcctgacgcttattttcgcattcatacttgcagaatcggatattaagctattctttccctgaaaccttctggaaaacagggagacaccaatgaccatgtacgccacgctggaagaagctattgatgccgctcgtgaagagttcctcgccgacaaccccggcgttgaagaagaagatgctgacgtgcaacaacttaatatccagaaatacgttctgcaggatggggatattatgtggcaggccgaattctttgccgatgaaggtgaagaaggggaatgcctgccggtcctgagcggtgaaggtgcgcaggccgtctttgatggcgactatgatgaaatcgaactgcggcaggaatggctggaagagaacacattgcacgagtgggatgagggcgaatttcagctcgagccaccgctggatacggaagaaggtcaaaccgcagccgatgagtgggacgagcgttaatttacgctactcgtaagggccgtggctggcatcgatcggcagcagcagcgtgtcgaaaattagcgagaatggcagatccagcacggtgaggtagcgccatgcggagtcacggagatcccatttcacacccgggtaatactgattcccgtggccctgccctggaatggtgcggctgatgatgctgccgcagccgctgagcaggcatgccatcagaacgacgatgatgattctcatgagtaacctctaaaaaaataccggcgattatgccggtattttagttggcgggaggtgcttcgcttacctgccctacttaaccacttacttcgccttcaacgccagcgggttcagcttcagttctttatagtagtttacccacgaagagtatctctccggagcggaccatacgcggtagtgaagacgcgccatcgtaaccgggtcgctcaacaggaccagacgacggtcacggttaagtttttccggggtctcgttcagcgcctgctcaacgtgacgatcgcgggcaatctccagcacctggctggcacggtgacgcgccgtcgccattgccgtcgccagggcgttgaatgacgggttaaacacggcgtgcataaagccgtcatccagcgtgcgattgcggttctgctcgagataacgatcggtgtctaccagcacctgcggcggggaatactcttccgggatcaggaacagcttccaacgtttggtccgcagccctaccgtcgaacggctggagatcacggagacaaacggcgacaggatcagcgagaagacaatcggcgccagccagaacaggaagcgcagatccagccacgccatcccggccgcccacaccagacccagcagcagctgagaaccgtggcgcataaaggcttcgctccacggcgtggagtcgtcatcacgctgcggtgagttccagaccacttcccagcccaggaacgcactgaccacgaacacggtgtggaacagcatacgcaccggtgccagcagcacggagaacagcacttccagcagcagtgaaagggtcacgcggaagaaaccgccgtactctttcgagcctttgcaccagatcaggatgatgctgagcagcttaggcaggaacagcagcaccatggtggaggcaaacagcgcaatcgccagttccggacgccactgcggccacaccgggaacagctggcgcggctgcaggaagtattgcggctccgtcagggcatggacgacctgcagcgctgtggagagcgcaaggaacataaaccacagcggtgcggagagatacgacatcacgcccgtcaggaacaccgcgcggtgaaccgggtgcatccctttcaccaggaacaggcggaagttcatcaggttaccgtgacaccagcggcggtcacgcttgagctcgtccagcaggttcggcggcagctcttcgtacgatcccggcaggtcgtaggcaatccagacgccccagccagcacgacgcatcagcgccgcttccacgaagtcatgtgacagaatagaaccggcaaacgaaccctcgcccggcagcggcgccagcgcacagtgctcaatgaacggcttcacgcggatgatggcgttgtgaccccagtagtgggattcacccagctgccagaagtgcagacctgccgtgaacagcggcccgtaaacacgggtggcgaactgctgacagcgcgcatagagcgtgtccattcccgacgcttttggtgaagactgaatgatacccgcgttcgggttggcttccatcagacgcaccagaccgctcaggcagtcaccgctcatgacggagtcagcatccagcaccaccatgtagctgtactggttaccccagcggcggcagaagtcatcgatgttaccgcttttacgcttcacacgacggcggcggcgacggtagaagatctgcccttcgccctgcacttctgcaatcagctccatccacgctttttgttctgccacgcagatatccgggttgtaactgtcgctcaggatgtaaacgtcaaaatgctccgcgttgccggtcgccttcacggactcccaggtggcacgcaggcccgcaaacacgcggtcaacgtcttcgttacagataggcataatcagcgcggtacggtgctcaggattgaggggttcatccccgaccgttgacgccgaaatgctgtatttgtcacgccccatcagcagctgcaggaagcccatcagcgcggtccagaaaccggccgagacccagcagaagagaaccgcgaacagcagaaggatgccgctctgcaggatatacggcagcagttgcatgaaggagacccagagatcctggcccatcatgtccatcgggttgatgaacgcccagccctgatacggcaggatggttttcatataccaggtcgcgacgaccgtctgcgccagcgtcaacagcagcaggaggtagcgacggagggtccccacggtacgccatttctgttcggaagcctgctcttctttcgtcaggcgtgacagatagcgcggcgtcacatcacgcccgcgcaggcgatcccagaagcggcccaccgggttggtgcgccacggatcggggaacattgaggaacgcgtggccttcggcatcgcctgaagctgatcgcgcccttcgtcgtctttaatcaactgcccttctgccagcgagtccggccaggcctgctccagacgtgcctttactgaccccagcggcgtatcatcatcacgggaaaactgacgatgttcaccatccagcgcggtgtgaaccgcgcggatgtcgctcttaggcagtgccgctttttcgatatccgtcagcggcatggcatcaatatattcagatgtattattcattggcaggtagctgatagctccaggtttcactcagcggctgatcgttactgaccagcgcagcacgcatttcagtggtctgtttcggatctttcactttcacgcgcagggtcagacgccagcctttggttaccgggttgtaacgcacggtattctcaacgatttcaccgttatcaccgatgctggcctgagcggcaacggcggtgtccggtgacagtttcttcatatcctggcctgtaaagtccacgacaaaggccacggtaccgtcaggctgacggataagattagactgcttcacatcacccgttgaacggcgagtctgcatcacatacgcgttatccggcgcatgcagcttatcttcgtcgcggctgaaggtgatggtgtacttgaagttcatctctttaccggcttccggcagctgatccggcgtccagtaagccacgatgttatcgttggtttcgtcgttggttggaatctcaaccagctcaaccttacctttaccccagtcaccgtttggcgtgacccaggcgcttggacgctggtcatagcggtcgtccaaatcttcaaagcgggagaactgacggccacgctgcagcaggccaaaaccttgcgggttttccatcgcgaagctgctcaccgccagatgtttcgggttgttcagcggacgccagatccactctccgttaccggcatgaatagacagaccgttggagtcgtgcagttccgggcggaagttagtggccggagacggctggttcggcccaaacaggaacatgctggtcagtggtgcaacgcccagtttgcccactttatcacgcaggtaaaccttggactgcacgtcaaccacggtgtcacgacccggcataatcacaaagcgataggcgccggtcgcacgcggtgaatccagcagcgcgtaaatggtcagacgtttatccgttggttttggacgttcaatccagaactcacggaaacgtgggaattcttcacctgatggcagcgcggtatcaatcgccagtccgcgcgcagaaagcccgtatacctgccccgcgccaatcacgcggaaatagctggcaccaagcatgctgacgatttcgtcgtttttatctttgctgttgatcgggtaaagcaccttaaagcctgcgaagcccaggtctttcaccgtatctttgtcgtgttgcacattgccaaaattgaagtaatccgggctgtatttgatcttacgtaccgctgtggccgtcacttcgttgatggcaacaggcgtgtcgaaatacataccctgatgataaaactcaagcttgaacggggtcttgatgttgctccagtaggctttgtcgtgattgaactggatctgctgatagtccgcatatttcatatcgcggaaaacggagggcaagttacttttcggcgcttcgtagctcttgccagccatcgattttgcctgttttgcgacatcgtcgatgttaaaggccagtgccgatgaggtatacagtgataacaccactgcagcacctaaccaacgcattttcatcatctgtggtttatgtttcataataagtaagcacttccccctttgtgtgcttatatcgatccgatccattttaatggaaactcaggcaatccgacaacattatcactgctttgttcagctgctggctcatggtttaagcaaatgaaagaacccattattcactttgcgtgcttatcctggagacagggtgtcggtcttggtgtagggttgctttcgaatgtaaccattatgagtcttagggataagacgaaaagtctgagaatgcacaacgttatatgagcacaacaccaacagaacgtgaatatttcctcgactcgatccgggcatggctgatgctattggggatcccttttcacatatcactgatttactccagccacacctggcatgtgaatagccagatgccctcctggtggctgacgctgtttaatgactttattcacgccttccgtatgcaggtgttttttgtcatctccggctatttctcttacatgctgtttctgcgatacccgcttaaacgctggtggaaggtgcgcgtcgagcgcgtggggatccccatgctgaccgcgattccgctgctgacgctgcctcagttcattatgctgcagtacgtcaaaggcaaagcggaaaactggccgaatctgtcgctgtatgaaaagtacaacacgctggtctgggagctggtgtctcacctgtggttcctgctggtcctggtggtcctcactacggtgagcctgttcattttcagccgcctgcgtcaccacctgagttcgagagctgacgcctttttcgccaccgttacgctgggcaaactgtcggtgctcttcttgctgttgggtatcgcttacgccgcggtgagacgcatcctgtttatcgtctatccaccgatactgagcgacggcctgtttaattttgtggtgatgcagtcccttttctacattccgttctttttaattggcgcgctggcgtttatttacccgaagctgaaagcgctgtttactaccccgtcaccgtggtgtgctgtgggtgcggccatcgcgttcgcggcctatctgctgaaccagcgctacgggagcggtgacgcctggatgtacgaaacggaaagcgtgatcaccatgctgctgggtttatggatggtgaacgtagtattcgcgctcggccaccgcctgctgaactttaagtccagccgcgtgacctacttcgtgaatgcgtcgctgtttatttatctggtgcatcacccgctcacgctcttcttcggggcttacatcaccccgcatatcgcctccaacacgctgggcttctttaccggtctggtgtttgtcgtggggattgcgatcgtgctctatgaaatccacctgcggatcccgcttctgcgtttcctcttctcaggaaaacctcaggtaaaagcctcataaacaaccgcggcgcactcagtgcgccgcggttgcttcaggtgtccagttcctgcccgcgctgggtcagcaaccgttgataaaggtgggtggtttcttcatcgaaacagacaaagataactttctcaggcatcggctttagcgacagatagcggtaaacggtatcgacggcgatcgtagcggcagccgccttaggatagccatacaccccggtactgatggccgggaacgccattgttttatagccgttgtcggcagccagccgcagacagttccggtaagcctcttccagaatactcgcctcgtgccgatcgccaccgtgccagacaggccctacggcgtggatcaccgctttggcaggcagatcgcccgcaagcgtaatgaccgcatggccgggaggacattcgccctgctgttgccgtacggttttgcaggcttccagcagctgcggtccggcagcccggtggatagcaccgtccacaccgcctccccccatcagggagggattggccgcattgacgatgacgtcgacgtgcatggtcgtaatatcaccctgaataacttcaatttgcggtttcataaagcccctctgcaacccgcctttttattaagtgtatcgcagggctgcccgggagaaaaaactatcagaaaaaatcctcttccgcacaaagcggaagagagaacgctatcgatactggatttcgacaaccgcgagcgttttttcagggttaaggtatttcatgcggagcgacaccagatctgaatcggacactttgccattaagcgcctcttcataactgaccatgcgcgtttgcatacgattattatccggacaggacatagcaaactgtctctgctgcggcgtaacttcacaggggtctgcaacaatggcaccgcgaaaatgaataacgccaccgttcacaatggtagccgaataaaccgggaggctaaaaacagaaacaatcaggcccagacccgtcacgagtcgagcgaaagagtggttcattatcggtactcctcaatgaaaatcgtccttgaggggtaaacgcacttcattttgacaaacgaagtctcacgttaaggaacataatgacctgatccctgatatcagcatagctcaacggcacagacccgccacattcgcaacacattgatttcatgaatgattaaagcgaacgttccgctggcgaccactgctgtgataaatgaagcgatttaccgtctgaaacggtgacaacgatttttaccgtgtctcccgcattaatatttaaactcaggcgcattaaatcaatcgtctgattagcgggtataaaaagggtattttgctgtcgggacgaactttgtcccccctgcccttcccgaacggaaacaatctgaacctgacaatcacatggctgcgccagggtgacctgaggaataatggtggtcatattttcctgctgcgacgttttgaaagttatctggctggaaagcgcggcaagaagaattaaggtattcatgatgaactcccgaaaaaaaacagggcatcagccctgtttttttgtagcacagatttcagtatcagtactgatgagctgtcgcgtggttaccaaagccaatctgggtaacgttgacagtagagttagaggcagtctggtcgacgagggcgccgttaaagccgccggactggctaacgttcataacagattttttgctgttccactgatccagtgttgcactgttgccaaatcctttctgggtcaggttgattttactgtcatcagaaccctgaccaacgtcagcgccgttaccgccacctttctgggtaatattcagcacggaatttctggcgtctgtctgcagagcaaccgcggagttaccgccaccgtcctgataaatattcagggttgaatttgggccactgtatccgccatgaccatgtccatgaccccagccgccctgattaatagaacccgccatagcactaccagaaactacgattgctgcaagcgctgccactttgagaaatttcatggtaaacccccatcggattgattaaaatcgtcgcgaatgcgctaatgttgaataacgttaatcgccatttgcgactgtttctgcactacaactgcggttttctgcgtaccgtactgcgtaatatttgctctattacccgaccctttctggataattttcgcgctattaccgtatccctcttgcgtaatacctgcatcattcgcggtaccgctctgatcgatccaggctatattgtaactccctgattgatcaactcttgctctgttgcccgccccatcctgtgaaacaatggacaagagttttgaaccttcctggcgaacctgagcgtcattaaaaacaccctgttgactggttgattaatgtttgcaaccgcctggtgtctgctagcctgctttatagcgctatcatcacctttccaccatttcttctttttgccatcagccctgaaaaactgatcataccgcgccttcgcctcccagaactgacagagcttatccttccagccatcaaaggatacaccacaatatttaaattcctgtatctgtttagtttctggattataaaatgtgccacaaatacgtgtttgatagctgattgttaccatactccagcgcgagcaacgcctcaccattggcattaccttcccttccggaggacagttttcacaggtcttatcatccgttttcgcctgtccccccgctttcgcgtcttcaccttcgtaactgaccgtttcggagtaatccatatcatcttcccagaaatctccgtgtgtctccgcgctgacggccatcggttcattcagtatgggatcgtactgttttccctgatattcaaatcctccctgcttcgtggactgcgcacttcctgaaccaggataagacatatcctcatcttcccagcctccatcgcggcttcctgctccgggaaaggttgctgttccggttgagccaccggccacaccaacgcttccggtagccgcgccccccattccagcccctggtaggatcataatcatcagagtcccctcctttctctgtttatcatcacatgcatataatcctcaacgcgctggtcggctgagtatccattcggcgttctcagccatttatccacttcaggcttcagataaaaaccaggccagaacgcttccaggaacaaaaagtcccgcctcacattcttttctttcagcggaagggtattggcataatccagtgcttttctcaggcgaacatggaacgtgtcatccggttcgttaatccccggatatttcctcttcagtctttgcgcggtatcgcgaacaaaatcatcatcttccattttgtccacactggcacactgctcttcagacagcttcagcatatgaattccctttgcttaaatgaccagactttcccatccactcttgtcagccattcacgcatcaaacctgtcaactcctggtgttgcaggtcgttcagcatcgttgccagacgcttctgaacgcgcgggtcctggaaacgcagcaacgcagtccgaccatccggtagtccgatattcatatttttcctgaaatgagcagccagttcagtaagcgaggaagaagatatcatccaggaaactgacggcagcgcggcttcgagttcgcaaagcttttctctgaaatccattatgctgttcatctccatgatccacggccccgcaaatgcaatgcgggaatccggccaggtatcgaacagggacatggcggcaggttgttgaactgacagcccctcaccgaaatgccgctcatattgcagcccatccaccagagcaaacactgatacgtctgatgaatgaatcagatgttgcgcagcaatactgaagctggagctgttcatgactcacctcttataacaaaggtgtcgccattcatcgccgctttcatcagacaactgaggcaaataccgccccctgtgctcgccttaaccggtattgaagccgcccctgccgccatcgtccttttcactttgcgtaaatacaccgccgtcgtgccgtactcaattctccccgcctccagtcgcaggtaactcccgcccccgatgagcgtgatacgtttttttccggcaaaggagatgtcactcgcagacgacagggttagcttcttctccgcgaacagccgcaggctggcgttctgcgcctggacatccaccggcccttccgatgccttcaggctcaactgcccggtgcgcgcaaacagcccgagcttttcgcctgccagcgcggtcatgttccccatcacgccggtgctgatatccccgcccgcattaatggcaacgttcttcgtggccgccatctgcaggtgctccccgctggtcagggccatcccttccggagcagacatcagcagcgcctcattaagcggtttcagccgctgctcaaacatcgctatctggctgtcaacgtccgccttcagcgcctgtgcctgctccgccgcgatttccagctgctgcagttgctggttgagccggtcgatttccttcagcgctgcatccatgtccagggcatcaccctgcgccttcgcctgcgcatctgcactgacaaacagccccttcccggctctcagggttccccactcgtcggtgcgcagttcgctaccagtgccgcgaggttgcccctgtgcgtccaccaggtgcccgctgttgagctgcgttttgccatactccgtggcgagcttgatatgctcctcgccgcgtttgtcttccatccgcagcttgttgttcgccggggtgcgcagcacgttgcgggtgtggttgtcccggttcaccaggtcaggatgttcggagtcgtgcagggcatacgcaatgtacggcaggtcaatatcaccgttgctgtacgctatcgccacttcggtcccgtcggtgagcggcgtgtgccagcccagcgtgtcaccggcatacggtttcgccatccgcagccacaggtagctgtaaccggcttccgtcccctcccggtcgaagtcgagcttcacccggtagcgtccctgttcgtcaaggtgagcgtaaatatcatttttctcccggctctcgacccgggccggaagcgtgccgtggatttccggacgcgggatgtccgcagggcggaaacagtaccgttcggtgtaaggcatgccccatagcgacacgtgcagacgggaatcacgggctccccggaaggtcacaagcgtgaggacaaccccctccttcagggccgtaatgacatcgccctgtggctccagcaccttcccgggcgtgaggtgggcagcattgctgaacaggtggatgcgggctgatttgttcagttcccgctcatggtggatgcgggcataaaaggcgccggattcggtttccggctcagggccggtgtcgtcacctgcgtcacggtaaggcgctgcgtagcggtaatgctccccggtggtgaccgcatcgttacgcacgctgaccgtcgcatccatcggtgtggtggcggtccggtagttgtaatcccgtgtggcgacggtgccggtgacaaccctgtgccaggtccgcacgtcccagaccgattctgccgcgccgtcgaacaggcccgatggctcgctgtacggcaggagcacatcaaaccggtagtgaagctggctgtcggcaaaaatgtacgtatccagaccgcgcacgtcatccatctccgttcgccagtaaatgcccacctcggacagaatgcgccggataaactccaggtccgtttcccgccactgggtgataatttcacgcggcgggtaggtgcgctccaggcggaagtcaaaatcaggtccctccagcccgtgtctgcgcagcacctgctcaaccacctccggaacggactggttctgatataccgcgcactgccgggtgtatcccagcagcgccaggcgcgaactgagcgtaagccggtagtgagactggtccctggatgtggacagccattccaggcgggtcaccctgccgtagacatttttgccgcttcgtatccggaaggtggcatatttcatcagcacctgttccggggggatgttcgcctgcaggcaggtgaactcaatatcccaccggaacggctcactcagagcttccctgccgcgaaagcgcaaaacatccggcttcactgaactgtcaaaaatatccagaaagtaacgggtctgtccgtcaaaaagcgccagccagttatccataacaaatcctgactaaatgaagggataaagtgaaatggttacataactaaaatttattgtaaataactgatattatggagggaagaacgctatcgtgcacaaatagagaagagaaataaatagacccgcttaacatacaaattatttatataattgctcacactttgcgtgtcgtgtacggtttcaccgctcaggtcgtcgacacggaaacgacctgagcggtgaaaagaagccttgcaccaacatcagggacattgctgataagagacaggcttgtacagcgttgttatcttacttcgccgcgttattcatcaccgcattgaatttatcgacaggacagaagccgttcgcatccaccgggcagcccttcagctccagcgtcacgcgctgcgccggagactgcagcgacagcaccctggcgttgcgcagctgctctgagctctgatagacatactcaattttcatcagctcctggttggcatttttgtcatgccagcgctggaagacaatcttgccgccaatcggggtgcgctcctgctggtcgtgcagctggtacggtttgaaatcgagggcggtgagcagggaagcaatgttcgaatcatgccccaccagcagggtgatctttggcgctttcgcctgctcggtgaccagcgttttatcgatatacttcaccagcggtttcgccacgttttgcgccacctcggtagaggtaaacagcgagtcctgatagccgtttttcagcttcgacagcacgcgccactgctggtcggttttgatttcgccccaggcgacctggtcggccgggaagccttcgtaatactgcagcgtgaacgcgtccaccagcgagttgcccaccttcagcggcccggatacgccaggctctttttcatagtcggcgctgaaggtatctttcgcgtccgccagcgagcagacctttttctctttgcaggacggcgagtcggcgtagttggtcatctgctccagcagcttgtagctttcaccaagctgcattttctgccgctcggactccatcgccttgagcgctttttcgcggaattccggcgagttatcggtaatcaccggattgaatgtcgggtccatggtgcccattttttcctgatggtgcacgggcacatcgcagcccgggaacgcgccggtaatgaagaactgcgcggtggcgacggtgcgctgcaggctgttggcgtaagcataaacgctatccgccggtggacattctcccgtcttcaccatcccctgctgcgccagccactcgcgcatgtagtgccccatatacacctccagcacgccacctttggtggtgagctggccgcccggcacttcccactccggccactgcttcggcgtggactgctccagcacgctgccgttattggccagcggcgcgcgcaggttgtgacggctcatgattaaaacttgctccagctgatacccttccggcgtctcttgcgcctgtacgccaaacgttgctgaaatggaaccggcgactgccagcgcgagtagtgcttttctcatccctaattcctcaatcgttttaaaatgtcgcgttcagtgtgacaggttcgtcacaattttccgggaagcatttctcaaactgatgattaacgtgcttacggagtgtgccaattagttttataataaaaccacaccccaccggagaattcgctgtgaaacgtacccgccttgaagagagcacctgccccgtcgcccgttcgctggatatcatcggcgactggtggtcgctgctgatcgttcgagacgcgcttcgcggtattaaacgcttcggcgagtttcagaaaagcctcggtatcgcgaaaaacatgctgaccacgcggctcaagctgctggtggacgaaggcatcctccggcttcagcccgcctccgacggcagcgcctggcaggaatatgtcctgaccgacaagggacgcgccctgcaaaccgtgctggttgccttgtcccagtggggcaatgaatttttgttcgcggaaaacgaatgcggcaccgttctcgtcgatagcgaacagcgcaaaccgctgcgaaaactgatgcttatcgccgatgacgggcgcgaactgacgcctgaagagatcgtggccaaactcccctcctgagcccacccgccaggcaaaagcaaaaaaatctcgccaatgtggttgcattataaaaccaaatggcagagatttaattcagtttcatattgaaaccaaataacccactttgcctgaggtaatgcattatgactacgcaaatcaccaccgccctgatcacgggtgcctcttccgggatcggtgccgtctatgccgatcgccttgccgcgcgcggtgccaacctggtcctggtcgcccgccgcgaggatcgcctgaaaaccctcgccgccgacctgcgcgcgcgctacggcgtggccgtcgatattctggtggccgatctcaccgatgaagccgggatccgcgcggtggaagaggaactgcgcagcaataccgccattgatacgctggttaacaacgcgggcaccgcgcagatggcgccgttcctcgcgggcgaggtggcgcagcatcaggccatcaataccctcaacaccacggcgctgatgcggctgacctacgccattatcccgcgactggcgcggaacaatcgcggcacgctgatcaatatcgcctcggtgttatcgctccatgtccgtgcgggcagcgcgctctacagcgccaccaaggcctgggtactgagctttacccgcggactgcaggaagaatttgccgacagcagcgtgcgcattcaggccgtgctgcccgccgcgaccgcgacggagatctggagccattctggcgtcacggtggacgatctgccggaaggatcggtgatgaccaccgacgatatggtggatgcgtcgctggcgggtctggatcagggcgaaccgatcaccatcccgccgatgcatgacgtcagcctgtgggaccgctacgaagcggcacgcctcgagctgtttaacagcgcgcgcaccggcatcccggctccgcgctacgtaaagcagtaacctaacgctccagctggtcgccgtactcgctcatccaggcggccagcggagagagtgcatcctgcagggttaaccccagcccggtaatctgatactccacgcgcggcgggatctccgggtagaccgtccgcgtcaccagcccgcgctgttcaaacaggcgcagctgcttcgtcagctctttctgggtaatgggggcagccgcccgcagcagatcgccgaagcggacaggcgtgttaatcacaataagacgataaaggatcgggattgcccatttgccggaaatcagatttacaaactgcgtcatcgggcaggtataggcctcagattttttttcacagcactcacccagcatttctgccatagcacacctcttgcctctttagtatccatttggtacctggtttcctttcgatactaacgtttctatagtgctttctccagtgacatttcaggagaagaacatgggtcgtttaaccgataagtatacgttgattaccggcggcaccagcggcatcggtcttgccaccgcgcaggcgtttatcgccgaaggcgcccgcgtcgccgtgaccggacgcaacccggacaccctcgccgaagctgagcgcattctgggcgataaggcctgggtgatcccgaccgatgcgggcgatatcacctcgcaaaaagcgctggcggaaaccctcgccgcccgctggccgcgcctggacgcggtgttcctcaacgccggcgacgtgacgcacgcgccgctggaagcctggcaggaagaggcctgggatcgtctgatgaacatcaacctgaaggggccgttctttttaatccaggcgctgctgccgctgctgaacaacccgtcctcgataatcctctgcggctccgtgagcgcgcgcatcggcctgcccaccagcagcgtgtatgccgcgagcaaggccgccctgctgtcgctggcgcgcacgctgtcggcagagctgctgccgcgcgggatccgcgtcaacggcctgagccccggtccggtgaagaccccggcgtttacgaaaacgggcttaagcgacgaggcgcttaacgcgatgatggcggaaatcatcaagctggtgccgctcggcagaatgggctcgacgacggagctggcaaaagccgcgctctatctggcctccgacgagtcgagctacacggtgggaacggagctgctggtggacggcggcatgggaagtctgtaattcaaaaggcgctgatgccggtgaccgcgccgacatacagcgccgcccacgcgcaggcggaaagcaggctgacggcgtagactttgacggcgttaagcctgagcatccccgccgccagcggcacgacatagcgcaacaccgccagaaagcgcgacgtaaacagggcgatgacgccgtttttttgcagctgatgctgaacccgtaaaaacgtagcggcatgcttcgccgtaaagcgcgcgaccagccgggtgtgccccatcagctggccgatatggtaattcagcatcgaacctgccgtcgcccccatcaccacggccagccacgccagcgccgggtgcatgctcccctggctgacggtaatgcccgccagcagcatcaccgacgcgggcggcagcacggaggagatcagcaccgtcgatttactcagcgccatcacaaataacagcgcgaaaagatgtgccggatacagcgcaaaatgattcagcagattatcaagccacgccattttctctcctccgttaattatttaatcctccatttaaagtgaataaacctaaataaagcctcaacattttattaataatatttatctaaaccgttcttaaacattatttaattttctgagcgctaaatttaaacaggcgtattatccctctcgttttacaacgatctcgttatggcgaggctcctgtacaaatacacgttatcgctctggtaggttcgagagaaccggcacagggtaaaacaggcactgtcgaatcaaggctttgtcagtataacttcccttgcgggatacggtgtacagtgctgaacccaggacgtggggatctcctcttcgacatgccctgtcttgctcgcccctgagagatgttattattcaaagggaattcactatgtcttacgctattcacaaccaaaacctggcattcaatgacagcgcggtcgcgcaatatatgaataccgattttatcgtcctcgatattgcattatgcgtggcgctggcgcgcgagcaattcttcaaaaaattaaaagacgatgatattccgtcgcatatttttattgaagacaatggccgccttgcggggatggttgccgtgcgcaagctgctacagaccacagataccgtacagccaattaaaagcctgatgatttcgcagtttttgcaggtcaaaccggaggatgaacgtgccgatgttgcaggactgctggcgcacggcgacgcagatgtcgtgcccgtggtgacccacggcaaactcgtcggctgcctgaccgagcgggaaattgcccatctgctggaagatgacgtcaccgaagatgcccagcttcagggggcgacgctgccgctggagaagccctatctggaaaccagcgccttcagcctgtggaagaaacgctccgtctggctgctgctgctgtttgtcgccgaagcctacaccagctcggtcattcagcattttgaagaggcactggagtccgccatcgcgctggcgttctttattccgctgctgatcggcacgggcggcaacagcgggacgcagatcacctccacgctggtgcgcgccatggcgctgggtgaagttcatctgcgcgacgtgggccgcgtgctgcgcaaagagatgaccacctcgctgatgattgccgtgacgctcggcattgccgggtgcattcgcgcctggatgatggggatcgggctggagattacgctcatcgtcagcctgacgctggtgtgcattacgctgtggagtgcgattgtctcgtccgtcattccgatggtgctcaagcgctgcggcattgacccggcggtcgtctccgcgccgtttatcgcgacgctgatcgacggtaccgggctgattatctactttaagatcgcgcaatatacgctggggctggagtgatgtgattccttgccgggtggcgctgccgcttacccggcctacccatcccgtaggcccgtgcaagcacagcgccgccgggcaacaatcagatcgcaccaagcgctctcaccgcctgcccaaatgcctcaatcgccagggcaacatcctcagccatcaccgattccgccggatggtggcttatcccgcccttacagcgcacaaacagcatccccaccggccagcgttccgccagggcgatggtgtcatgcccggcgccgctgggcagagataacgagcgcccctgcaccgattcaaccgcgtcgcccagcaggcgctgcaaacgcgcatcgcacggcgtggcggcgatccggtaaaactcctcggcgctgaagctcagcccgcgacgggcggcgatcgcctgcgcctgcgccagcagttcagcgagcagcgcgtccagcggggcatcctgcgggccgcgaatatccagcgagagcgcaacctcgccggggatgacgttgaccgcgccgggcaggcagcgcagttccccgaccgttgccacccggttgccgccctgctgccgggtggtgttttcaatcagcaccatccactcggcggcggcggccagagcatccttacgatggttcatcggcacggtaccggcgtgcccggcctccccggtgaagcggcagttgaggcggcgcgcgccgttgatggcttccaccacgcccagcgccagcccttcctgctccagacacggtccctgttcgatatgcagttccagacaggcgctgaaatcctcctgatggcgtgccgcgagcgccacgcgagtgggatcgagccccgcctgcaccatcgcctgcgccacgctgatgccctgggcatcgcacgtctccagccagccctgcggccaggttcccgtcagaccacggctgcccagcagggtgataccaaaacgggtgccctcttcgtcgccaaagccgacaatctcgatggcctgcgccagatgccgcccctgcttgtgcaggttgtccaccacttcgatggcggtgagcaccccgagcatgccgtcgtagcgcccggcgttgcgtacggtgtccagatgcgagccgagtagcaccgcctgcgccccctcctgcgcgccctcgtagcgtccacagatattgcccacgctgtcctgccagacggtcatgcccgcctggcgcatccactccccaaccagctggttggcctggagatgctgcgtggagagatagacccgcgtcaggccgtccggggtttcgctgatggcggccagcgcgtcggcgcgcgccatcacccgctctgccgccgggctcattgcggcgtctcgcgacgatagtggtcccacgcggcctgcatggcggccccctgggtggtggtgaatttgaggtagttcagcaccgactccagcgcgctcagggtggtcatcacgcagtccttgcgcgcattgtagcccatggtgccaatgcgccacaccctgccgtgcagcgggccaaacgaggtgccgatttcaatcccgaaatcttccagcatcagcttacgcaccaggtcgccgttgatcccctgcgggatgaccacgcccagcacgttgttcatcttgtgcttcaggtcgccgaaggtctcaagccccatcgcctgaatgcccttcagcagcgcatcgccgtgcagcttgtggcgggcgatgccgttatccagcccctcctgcaggatcagccgcgcgcattcgcgagcgccaaacagcgcggtagttgcttcggtgtggtggttcagccgctccggcccccagtagtccatcaccatgccgagatcgaagtagttggagtagatcatctcctcgtcgccgtcgcggtgggcgtcggtgcgaataccctcctccacgcacttgcggcggcggattgcctcttccatccgctcgctcagggtgatcggcgacgtgccggacgggccgccgaggcacttctgcatcccggccgagacggcatccagcccccaggcgtcggtctccagcgcgttaccgccgagcgacgcggtggcatcggtgtaaaacagcacgtcgtagcggcggcagatcgcgccaagctcggcgagcggctgcagcatggtggtggaggtgtcgccctgcacggttagcagcaggcgcggacgaatacgcttaatcgcatcctccacctggtccggggtaaacacctcgccccacggtacttcgatggtatgcacctccgcgcggcagcggcgggcaatttcgcacagcaggtgaccaaagcggccaaacaccggcaccagcaccttatcgcccgggcgaatggcggagaccagaatggcttcaatccccgcgcgggaggtgccgtccaccagcatcgtccagcggttttcggtgcggaacacgccgcgatagagcgccatcacctcgttcatgtagtgggtcatggccggatcgtactggccgatcagctggctcgacatggcgcgcagcacgcgcgggtcggcgttgatcgggcccggccccatcagcaggcgctggggcgggttgatttgcggtaagtgtgcgatatccattgttcagtccttatcagttgagaccgcgcacggaggagatgaactgcttcagttccgtggtctgcgggttggcgaacagcgttttgctgtcgccctgctcccagactttcccctggtgcataaacaccacgcggtcgcccacttcgcgggcaaaattcatttcatgggtaaccagtatgagcgtcatcccctcggccgccagctgctccagcaccttgagcacttcgcccaccagctccgggtcgagggcggaggtgatctcgtcgcagagtaacactttcggcgacatcgccagcgcgcgggcaatggccacgcgctgctgctggccgccggagaggctcgacgggtagtaatccagacgatcgccaagccccactttctccagcatgcgctgggccaattcgcggcattcggcggcgcttttcttcagcacccgacgcggggcgagcatcacgttctccagcgccgtcatgtgcgggaacaggttgaagctctggaacaccatccccaccgagcggctgatttcacgcgcctgagaatcccggtcggtaatggtcatgccgcccagcttgatgctgccgtcctgatagccttccaggccgttgatgcagcgcaggagcgtgcttttgcccgatccgctgcgcccgatgatggagatcacctggcccatgtcgatatccagatcgacgcccttgagcacgtggttatcgccgtagtatttctgcacctgattaatggtgatgagaggcattgaatttcgtctccagatagcggctgtagcgcgacagcggataacacagaataaagtagcccagcgccaccagcgcaaagaccttaaacggctgataggtcacgttggtcagcatggtcccggccttggtcagctcgacaaagccgataatcgatgccagcgcggtccccttgatcacctgcacggcaaagccgaccgtcggcgcaatgccgatgcgcagcgcctgcggagcgaccacgcgaaacagggtctgtccaaaggtcagccccagacagcgcgacgcttcccactgccccttcggcagcgcgcgaatgctgccgtaccagatatcgagcagaaacgcgctggtgtaaaacgtcagcgccagcgaggcggcggtccacggcgagacgtcgatgccgaacagcgccacgccaaagaaggccagaaacagctgcatcagcagcggcgtgccctgaaacagctcaatatagccgcggataatgcgcgtcaccgtgcgtccgcccgtcaggcgcagcagcagcagaggcagggtcaccaccgcgccgccgacgaacgccaccagcgacagcagcaccgtccagcgtccggccagcagcagattgcgaataatgtcccagtcggtaaaggtggtcatcatgcctgcacccccagccatttccgtcctgccgccatcatcagctggcgcagggtaatcgacagcgctaagtaaatcccggtggtcaccagatagacctcaaagcttaaaaacgttctggactggatcaggttggcggcgaaggtcagctcttcataggagacctgcgacaccaccgacgagccgagcatcacgatgatgcactggctcaccagcgccggataaatgcgctgcagcgcaggcggcagcaccacgcggataaaggtctgcaggcgggtcagccccagcacgcgaccggcctcccactgccctttcggcgtgacctgaatgcccgcgcgaataatctcggtgctgtaggcgcccaggttcaccaccatggccagcagcgccgcttcccccgccgtcatcttcaaacccaggttcggcaggccgaagacaatgaaaaacagttgcaccacaaacggcgtgttgcggatgatctccacatacccgccccaaatccggctgtaccaggtggtgcgtccgctgcggatcgccgcgccgataatccctgttgccagcccgccgacggtggccatcaccgtcagctgaatagtgacccacagcccggccagcagcgccggccagtgcggccagagggcggaaaaatcaagttgctcagtcatcggctcaggcgccaaggtttgccggcagcggggccttcagccattgctcagacagaccgttcagcgtgccgtccttaatgccctgctcgatcagcgcgtccacttttgccttcagggccggttcgtttttcttcaggccaatgaagcacggcgagtctttcagcataaagctcggcaccggggctttcgccgcgttctggcgcgaaatggccgccaccacgagattgccggtcgccacgtactgcacctggccggacagatatgccgacagcgtggtgttgttgtcttcgtaacgcttcacgtccgcgtctttcggcgccaggccggtcagcaccatgtcctccaccgccccgcgcgtcacgccgatggtttttccgctcagcgcggcggcgtccttcagttcagcccctttcgggccaaacacgccgaggaagaacggcgcgtaggcgcggctgaagtcgatcatcttctcgcgctccgggtttttaccgaggctggaaatgaccagatccaccttatcggtttgcaggtacggcacgcggttggcgctggtcaccggcaccagctgcagcttgagcttcatctgtttagcgagatagcgcgccatgtcgatgtcgtagccctgcggctgcagatcggttcccaccgagccaaacggcgggaagtcctgcggaacggcaatgcggatggtgccgcgcttctcaatatcctgaagctggtcagcctttgccggcagctgcgtgaagaggcatgcggccccggccagtgcaattaacagttttttcatggtgcttccccgtaacgttaacatgaaacaaaagattctttgaaggtgattttgcaactaatgtgccagatacggcgaagcggggaattttctattaaagcctgataaaacgcgggcggggcgaaaacgctctccattttcgccccgcccttatgcaccattttaatgcaaagcaccaccctgatgccccattatcgctgttcgagttcgtccagctgctggtagagggaggcgatctcgtgaatgcgcggacggcctttatcgaggatctcatgcaggaaggcgttcgccagcaggttgatcaggctgttgaccgaggaatagctatcataggccgagacgctgtccagcggggcgcagagctgcctgctcgccagcggaaacaggctgtgggcctgcggctcgcacatcagcagcaccggaataccgctgctctgaagctgctgcagcagcgggcggatgatgcgcgggcgacggcgaaaggccatcattaccaccagatcgtccggcgttaagtccaccagctcctcgctcaggctctgccccggctgcggcaggaccagcacctgaccgcgcgcctgcagcagctgctggcgcagatgaagcgccgccggataagcgttacgcatgccgataatgacgatgcgccgcgccttcaccatgcaggctatggcgtcggcaaactgctgcgcgtcgagggcattgacccactgggtcaggttcgccatctcctgcttatagtggcgcgccagcagcgtgttgccctgcaccgcgtcgcggttatcggtgagcggcattccgctctggcgcagggtgcgcagctcgtcgcgcatgtccttatatttctcatagcccagccgcttaaacagacggctcaccgtggctttcgacaccccgctcagctgcgccagctcggcgctgttgtagctaatcagatcgtcaaaatggtcgaatataaagtccgccacccgctgctcctgcggcgacagcgacgggtattgtgctttcagacgttcatctaactgttccatagcgcctctgtaacttttgtttcattacattgtaccttttttgtatgtattcattatacgtgccagtttactgaaacttttctttcagaactggaacagcttttgcagcaccttgtgactttcagagttacgaggacgcttcatgcaaagtaatgtctccacgcacggcatggccgttgcgccccacaatcttgccagccagagcgcgctggcggtgctgcgcgaaggcggcagcgcgatagaggcgatggtcgcggcagcggccaccatcgccgtggtttacccgcatatgaacgggctgggcggcgatggcttctggcttatcgtgccgccggaaggcgaccccatcgccattgacgccagcggcgcggcgggatcgcgcgcgacgctggccgcctacgatgggctcacgcagatcccccatcgcggaccgcaggcggcgctgaccgtcgccggcacggtaagcggttgggacgaggcgctgaaggtctcgcgcgaaatgaccggcaaaacgctgccgctggcccgcctgctggccgacgccattgactatgcgcagaacggcaccccggtcacggcctctcaggcccacgccacggccagcaagttcgacgagctgaaggccatccccggcttcgcggaaacctggctggtggacggtaagccgccgcaggtcgggagccgcttttaccagcccgccatggccacgaccctgacgcgtctggcggaagagggtctcgacagcttttatcgcggcccgctggcggaagtcctggcgcacggcatggagacgctgggtctccccgtgacgctggccgatctcaacgcccacgcggcccggcgcaccacgccgctgaagctggagcatcagcagggagagatctttaaccacgccccgccaacgcaggggctggtctcgctggcgatactcggcatcaccgaccgcctgaacatggcggaagccgacgacgccgacacccttcaccgcatcgtggaagccaccaagctggcctttggcctgcgcgatgcccacatcaccgacccgcgcgcgctgaaaaccgatgttcagaaactgctggatcccgccgccctgcaggcgcttgccgacagggttgacgacagtcgcgcggcgccgtggggaaccggaaaaggtcccggcgatacggtgtggatgggggtgatggacagcagcgggcttgccgtgtcgtttatccagagcctttatcacgagttcggcagcggcgttgtcctgcccgataccggcatcgtctggcagaaccgcggcgcatcattcagcctcgatcccgcccatcttctggccctcgcgccgggcaaacagccgttccacaccctgaacccggcggcggcgcgtctgaaggacgggcgcgtgatggtgtacggatcgatgggcggcgacggacagccgcaaacccaggccgcgctctttacccgctacgttgtccagggcgtccctctgcaggagagcatcacccgcccacgctggctgctggggcgcacctgggggcaaacctcagacaccttaaagcttgaagggcgtttttcacccgagacggtcgcgcgcctgcgggcactcggtcacgaggtggagctattccctgactttagtgaagccatgggccacgcgggcgccattgttcgccaccccaacgggctgtttgaaggggcatttgacccgcgcagcaacggcgcggccgccggattctgaggagaaaacaatgacgacacaccaacccgactggcaggcgtacctggcgcagatggaaaccgtactcggcgtgacgctggatgacgcccgccgggccgaactgcagctgcagtttagccgcatagccagcatggccgccccgctgatggcgctgccgctcgacgaccgtctggagatcgcaggagtgtataaagcatgacgctacacgagatgagtatcagcgcgatccagcaggcgctgagcgcaggcgagctgagcgctcgcgagattgcccgccagacgctggaggcgattgcgcgcgtgaatccgcagatcggcgcctggaccgccgtgacggaagcacgcatgctcgccgaggccgacaatatcgataccctgcgacgggaaaagcgccccctgccgccgctggcgggcgtgccctacgcggtaaaaaatctgttcgacgttgccggtcacaccaccctcgccggggccgagctgttcagccagcgccccgctgccgccgccgacagcttcgccgtgcgccagctgcgcagcgcgggcgggctgctgaccgggatggtcaatatggacgcctacgcctacggctttaccaccgagaacagccactacggcgcgacgcgtaacccgcacgatctgacgcgcattgcgggcgggtcgtccggcggttcagccgccgcggtggccgccgggctggtgcacttttcgctcggcaccgacaccaacggctcgattcgcgttccggcctcactgtgcggcatctacggcctgaagcccacctttggccgcctgtcgcgatccggcagccatccgtttgtcgcgagcctggatcatatcgggccctttgcgcgccgcgtatgcgacctggcgtccgtgtacgacgcgctgcagggccgggacaccagcgacggttttcaggcagagagctcgcgggaacagacgcgccccctgcttgaccgcgggcttgacggcctgcgctgcgcggtgctcggcggctacttcaccacctggtgcgacgcggacgccagagacgccgtggcgcgggtggcgaaggcgctcgacgtgcaggatgagcttcagtttcctgacgccgagctggcgcgttccgcggcgtttatcatcagcgcctccgaagggggaaatcagtacctgcctgcgcttcgccgggagcccgagcgttttgagccgcactcccgcgaacgcctgctggccggggcgatgatcccttccgcctggtacattcaggcccagcggtttcgcgcgcaggcacggcaggcgtttcacgcgctgtttgcacgggccgacgtgctgattgccccggcaacgccgcgcagcgccacgcggatcggcgagcaaaccatggagattaacggtcagccgcttcccatccgcgccagcatggggatgctgacccagccgatttcgtttttaggcctgcccgtgaccaccgttccgctgcgcaccgcgcagggcgcgcccattggcctgcagctgattgccgcgccgtttaacgagcaggcctgcctgcgcgtcgcgcgggttctggaagagagcggcatcaccgatgcccgcccggcggagatagcagcatgatgaatcacgatgacattaacctcccgtgggtggttgccgaggtgacggccgcgttttaccgctatgaggacgcgctggtgagcaacaacgttgcggtgctggacgagctgttctggcacgacaaaaacacggtgcggctgggggcaggtgaaaatctctacgggatcgatgaaatccgcgcttttcgtgcggcgcgccccgccgccgggctgcagcggacgttgcgccataccgtcatcaccaccttcggggaggattatgccgtatgcagcaccgaatttacccgcgagagcacggaacgcattggccgccagcagcagacgtgggtgcggtttgcctacgggtggcgcatcgtggcggcgcaggtgagtttgatggtgtaacgctgaaaaacctgcccggtggcgctgcgcttaccgggcctacgatgttccgtatgccctgtgggccctgtaggccgggtaaggcgcagccgccacccggcaaaacatcgcacacttacttctgaaacggatgcacttcccgccagtggtcggcaatctgctggcgggtacagacccacacccgctcgtgctgctgcacataatccaggaaccgctgcagcgcccgaaaacggcccggacgcccgagcaggcggcagtgcatgccgatggacatcatcttcggcgcgctttccccctcttcgtacagcacgtcaaaactgtccttcagatacgtataaaactgctcggcggtgttaaatccctgcgcggtcgcaaagcgcatgtcgttcgcatccagcgtatacggcacgatcaggtgcggcttgcgggagccgtcgctgcaggccacttccgtccagaagggcaaatcgtcgccgtagtagtcgctgtcgtagtcaaaaccaccgtgctccaccaccagctggcgcgtgttggggctgtcgcgcccggtgtaccagccggttggcggcttgccgaacatgtcggtcagaacgtgcaccgccttgtgcaggtgttcgcgctcctggctgatgtccatattctggtagtggatccagcgccagccgtggctgaccacgtcgtaatccgccgctttgatcgcctcaacaatctccgggtgacgcgccagcgccatcgccacgccaaagaccgtcagcggcaggccgcgcttttgaaattcattgtggatccgccagaacccggcgcggctgccgtattcgtagagggagtccatcgacatgtgtttatccgggtagctggccgcgccgatgatgtccgacaggaactgctcggacccggcatcgccgtgcagaacgtggttttccgccccctcttcgtaattgagcacaaactgcacggcaatgcgcgcctgattcggccaccgcgcgtgcggcgggttgcctgcgtaaccgcgcagatcccgcgggtaatcctgttcgaaaagccccattgccacccccaaaaattaaaatggattcaatgcctgaaaatgcccgcttaacgctttgttctccgggaacgccagatccccgtgcttgctggtcgacagccccagcgccaccagcgactccaccatctttaccgccgcgctgacgccgtcgatcaccggcacgcgcaattcgcgggtcagctcctgcgccagggtcgccatgccgccgcagccgagcacgatggcgccgcagccatcctctttcagcgcctgtatacagcgcgcgcgcaccttctcctgcgccagaccgctgccgtcttccagcgccagcaccgggagatcgatagcatgcagcgccgcgcagtggtcctgaaagccatactggtgcagcagatgacgggcaatgatcagcgtgcgcggcagcgtagtaaccaccgaaaagcgcgtcgccaccagcgtcgccatatgcatggcggcttccgcaatgccgactaccggcccctgcgccagctcgcgcgccgccagcaggcccggatcgccaaagcaggcgatgacgtgaccatccacgccctgctccctgccttttttgatctgttccaggacaccgacggcggcgatggcctcatcgaagtggccttctatggacggcacgcccgcgctcgggcagaccgcgaggatctccgtccccggcgccgccaccgcgcgggccgccgcgccgatggtttccgtcatggcgaggctggtgttggggttgatcacttgtatacagacagacattacgactccttgtggccggcaaacagccgggcaaaatcaggcaggcactcgcccgcccgctcgaagcagaggctggcgacgatatgttcaaaatggtgcatgagggcatcgcttagtggctcaagcgccttctggcgcagcagatccacaagctgttcgtgatcgttgcagcggcagccctgacgccacggcgcgccccaggtggcaatcaccagcgaagaacgctggctcaggccggtcaccatctccgtgagcacctggttgccggagatggcctgcagctgaatgtggaaattggcggagtggcgaatcgccgccgggccgtcataggcctcgtgcgcctgctgctcctggcgaataatggcctcgagcgcggcaagatgcggctgctggcagtgggccagcacgtccggcaggttggcgacctccagcagcgcgcgggtgcggaagatgtgccgcgcctcttccaccgtcgggctggcgacgtgtgcaccacgcttgggcgtcagggtgaccatttgcacagcggcgagtcgttgaagcaccttgcggatgcccgtgcggctcacgccaaagacctctgccagcgcctcttccggcaatttgctccccggcagcagctggtgttcgacaatcgcggtcatcagcgcctggaagatggtttcgtctttgtcatgcaggtctggcgcggtctgcagggcgtttatgttgttcattcaccactccgaattttactttccgttatagaatcgtatacataaaaataaaatattgcatacaagatttattattttggcctggatcctgcaacaccgtttgcactcccactcaacgggttttcattcacaggagcaggtttcatgccaaacagtcaaaacgcgcagcagggtacggccgctgattccggtgcggtttacagcccacgtctttgcaatgaggatctggcaccgacgcgtgaccagaactggagctggtacaacatcttttcgttctggatgtcggatgttcacagcatgggggggtatgtggtcgccgcgagcttctttacgctcgggctggcaagctggcaggtgctgctctgcctgctggtggggatttgcatcgtgcagctgtgcgccaacctggtggccaaaccgagccagatggcgggcgtgccctatgcggtgatcagtcgtcaggcgttcggcgtgttcggggccaatattccggcggtgatccgcgggctgattgccttcgcgtggtacgggattcagacctatctcgccgccaacgccctgatgctggtggcgctgaagttctggccatcgctctcttcactcactaccggcgcattcctgggcctgtcgcatctgggttggatctgctttgccattatgtgggtcctgcaggcgatggtcttctggcacggcatgagcgccatcaagcgctttattgatatcgccggtccggcggtctatgtggtaatgctggcccttgccggctggattgtatacaagaccggttttgacggcatctcctttaccctcgccagcaaatccctgagcgcgggcgaacagacctggcagatgatcaccgcgaccgcgctggtggtctcctacttctccggcccgctgctcaactttggcgacttctcccgctacggcaaaagcatgggcgagatccgccgcggcaaccgctgggggttgccgtttaacttcctgctgttctccatcgtcaccgtggtcattgtctccggcacccagtcgctgtttggccgcatgatcaccgacccgatcgagaccgtcagccgcgtgggtaacgatctggccgtggcgattggcctgctgacgatgatcactgccaccatcgggatcaacatcgtcgcgaacttcgtctccccggcgtttgatttctctaactgctcgccacagaaaatcagcttccgcaccgggggcatgatcgccgccgtcggctcgatcctgctcaccccgtggaacctgttcaactcgccggagcttatccactacaccctggacgtgctcggggcgtttatcggcccgctgttcggcattctgattgccgatttctacctgattaaacgcggcaaggtgtcggttgacgatctgttcgacgacacgccaaagggcaaatactggtaccgcaacggctttaacccgaaagccattggcgcgctgatcccgtccgttgccgtgggcctggtcatcagctttatcccggccctgcatgaggtggcaaacttcagctggtttatcggcgtcttcctcggcggcgtgacctaccgctggctggcgcgggaagagcgcgagacggcaggcgcgacgtcgtttggctcccgcgtggcgacgcaaaaagagtaacccctcctctctggccgcagcgtatctgcggcccgttcattctggcaccgttcttgctgagctttcccaccccgctacgcacacacgaaggcaggaaccatgatggaataccagactgcgatacgcggtgcattttttgatattgcccgggtctgcgacagcgcagacgccattgcccggcacgcgcgctaccttgaggacggcctgctgtttatccagaacggaaaaattctggcgcagatgccgtggcaggagggcgagcagtatcttgatccgcacaaaggctataccgacctgcgcggcaggctgctgctgcccggctttgtcgacacccacgtccattacccgcaaacggagatgatcggcgcctttggcgaacagctgctggagtggctgaccacctacaccttcccggtggagagccagtttgccgatgaggcctacgcgaaagagatcgccgaatttttcattcagcagcttgtgagcaacggcaccaccaccgcgctggtgttttgcacgctgcatccggaatcggtcgaagcgctgtttaccgaagccctgcgcctcaatatgcgccttatcgccggaaaggtgatgatggaccgacacgcgccggactacctgagcgaagacgcgaagcagagctaccggcagacgcgggcgctgattcagcgctggcatcaccgtgggcggctgggttatgcgataacgccgcgctttgccccgacctcatcacccgagctgcttgcggcggtcagcctgctcagagaggagttcccggacacctggctgcagacccacctgagcgaaaaccccaacgaagtggcctgggtgagcgatctctggccggagcatgagcgctacctggacgtgtatcaccactacggcctgaccggcgagcgcagcgtgtttgcccacgcgatccatctgcaccacagcgagtggcagtgtctgcatgacaccggctcggcggtggcgttttgtcccacttcgaacctgtttctcggcagcgggctgtttcgcctgcccgcctgctggcagcacagggtgcggatgggcatcggcaccgacgtcggcgcgggcaccaccttcagcatgctgcgcaccctgggagaggcctacaaggtcgggcagcttcagagctatcgcctgcgcgccagcgaggcgttttatcacgccacgctgggcggcgcgcacgccctccggctggacgacaagattggtaacttcgcggcaggcaaagaggcggattttgtggttatcgaccccaacgtcacgccgctgcagcgcctgcgcaatcggcgctgtcaggatatctacgagcagcttttcgtgctgatgaccctgggcgacgagcgcaacatcagcgagacctgggtcaacggcgagcgggtatggtcagctgccccgataggttgaccatccgccgggggcaatcacaaacggcagatggaagtgttcgtctgccgtttctcccgtgacaaactcaatgtgcgcgcagagatagatcgtcttccggccggtatcgccaaaccacgccccgatctccgccaccagccgatagcggcccgcgggcagagagggaacgaacgcggcgatgcgcccctgggcgttggtaacgcccgtggcgagcgtcttcccgtcctgttgcagatgaaccgtcacgccctccgcgggcttgcccgtcgaaatatcgagaatatgggtgctgagtgtgctcattcgtggatgactccttccaggcgcagcagcgtaatttcccgcagctgttccagcgcggcacggatttcctgcgcgtcgctgttctccagccgcgcgtgcagggcctgcaatatctcctcgccgctgcggcccttcgcgcggatcagaaagacgcgtccaaagcgggcttcgtagcgggcgttgccttcacgcagcgcccgggcaagagcagcatcgcggtcattcaccgccccctgctcctggcgcgacagcgccgcctccgccgctgaacccgctggtttttccccgatgcgcggatgggcgctcagggcttgcgccagcgccgcttcgttccagttttgcatcagcgatttcgccgtactgaacaattcgtcccggctggcgtaaggccgcccgtgaaccagcgcatcggcccagcggggaagcgccacgcaggggtgaatcagcgctaacgcctgttcatggggaagatgattgaagtcctgcagtgagatcatagtgtctcctttattgtccttctccaggctattgcacaaaccacgccaccctgagcacaggcgtgaaacagtcgattccacaaggtcgaccaggaaatttttgattcataaaaaggcacactcaccgcgtttacgcaccttagcagtgcaaacgtctcccttacaacgctgttttcgccatgctgcagcctggtacgcaaattgctgactgtctttacaccctgcaaaaggagagaagcatgaaagcaatcgttattggcgcgggtattggcggcctgagcgccgccgtcgcgctgaagaaagcgggcatcgactgtaccgtgtttgaagccgtaaaggagatcaggcccgtcggggcggccatctccatctggcctaacggcgtgaaatgcatgcagcacctcggcatgggcgacatcatcgagacctggggcgggccgatgcgttttatggcctacaaggattaccggcgcggcgataccctgacccgctttagccttgccccgctggttgagcgtaccggcggacacccctgccccgtctcgcgcgctgagcttcagcgcgaaatgctagacttctggggtcgcgacaaggtgcagttcggcaagcgcgtcgaaggcgtccatgaagacgacgcgggcgtgagcgtgaccttcaccgatggcaccaccgccgccggggatttcctgattgccgccgacggcagccactcggcggttcgcccgtacgtgctgggatacaccccggagcgccgctacgcgggctatgtgaactggaacgggctggtgaagattgacgaagagatcgccccggcgcaccagtggaccaccttcgttggcgaaggcaaacgcgtgtcgctgatgcccgtctccggcggacgcttctatttcttttttgacgtgccgctgcccgcaggcctggcggaggatcgcaccaccctgcgcgccgatctcacgggctacttccgcggctgggcgccgccggtgcagaagcttatcgcggcgctggatcctgaaacgaccaatcggattgaaatccacgacattgagccgttcgacagcctggtgcgcggcaacgtcgcgctgctgggcgatgccgggcacagcaccacgccggatatcggccagggcggctgcgcggcgatggaagatgccgtggtgctgggggaatgcctgcgtgaaaaccacaacatcacgctggcgctgcggcagtacgaggcgctgcgctgcgaccgcgtacgcgacctggtgctgaaggcgcgcaagcgctgcgacgtcacccacggcaaagatatggcgttgacgcaggcctggtatcaggagctcaaagaggagaccggagagcgcatcatcaacggtctgtgcgagaccattcagggcggcccattaggctgaacgtaagagggacaacgatgaaaagagaaccgaccccacccgcccactgtacgtttgagccagaggactggctgcgtctggcgaaatgctggcatccggtcgcgcgcgcctgcgacgtcggtccggcgccggtcaaagcgacgctgctggatgagcagctggtgatttaccggattaacgaccaggtcgtggttgcccgtgacgtgtgcccgcaccgcggcgtgccgctgacgctcggctttcacgacgagcacgggattatctgcccctatcatggcttacgctttggcgaggacgggcgctgcaaccgtattccctccagccccgaccagcccgttccggcgaagctgaacctgattaactacgcggtcgaagagcggttcgggctgatctgggcctgcctggcctatgatccggataaccccgcgccgctgcccgccatgccgcactgggatgacgacggatttcagcagattaactgcccggcgtttgaggtgaacggcttcgccggacgtcaggtagagggttttctggacgtggcgcactttgcgtggatccacaccgaaacctttgccgaccccaataatcagcttgtgcctgcctatcagccacaggagacgccgttcggcttcgtggcggattactggagcgccgtgagcaactatcccgccagttcccccgtgcaggctccggaagggttccagtggctgcgccattttgaaatgcacctgccgttcaccgccaccctgacgattcatttcccgggtgaatcgcggctggtcattatgaacgccgcatcaccggtatcatcgcgcgtgacccgcatgttcgcccctattgcccgcaattttgacctgcatattccggtggaggacgtgcatgccttcaacctgcggatttttgaagaggatcgcctgatggtcgaaacccagcgcccggaaagcctgccgctggacctgacgctggaagcgcatatccccgcggataaaagctcgattgcctatcgtcgggggctgaagaaaatgggctttggcgagtttttcctggtatgacggaggccaatatgctgagcgtaattgttgacgggctgtggcgcgagggcgacaaaagcctcgccgtcaggctggtggctgataacggcgacgcgctgccggcgtggcagcccggggcgcacgttgatgtccacctgccctgcggcgtggtgcgcccgtattccctgaccggagcatgtggggacgagagctatcttatttgcgtggggcgtgaaaccgcctcgcgcggcgggtcgcgctacgttcacgagacgctgcgtcccgggcagaagctgatgatatcggctccgcgcaacctgtttccgctgcagcaggcagagcgggttttgctcctggcggcggggattggcattacgccgctgtatgcgatggccctgcagctgaaggcgaccggaacgccgttcacgctgcattattacgtcagaaaccgggaaagcgcggcgtttgggcgcgaactctcccggctcggtgagtgcctcattcataccgccagcccgcgcacagcgctggcggcacatctcccggtggccgaatcgggccttcacgcctgggtctgtggtccggcaggttttatggaaaaagtgcgtgaggtggcggcggcaaagggatgggatgacgcccatcttcacagcgaggcgtttcagcccgcagcgcccgccgcaggcggtgaaaccggggagatcttcacggtcaaactggcctccaccggggagcgctggccggtgcctgcggataaaaccatcgcccaggtgctgcaggaaaatggcgtggcggtcccgctttcctgtgagatggggatctgcggcgcctgcctgacgccggtgattgacggcgtggtggatcaccgggatagcgtgcagtcggaggcggaaaaaggcgcgatggaccagcaggtggcgctgtgctgttcgcgaagctattccggggagctggtgattgggctgtaaaacgaaaaaaccctgcgatattgctatcgcagggttttcgaatttggcggaagcgtagagattcgaactctagaaccctttcgggtcgccggttttcaagaccggtgccttcaaccgctcggccacgcttccaaagtgaggcgcactataaacatctattagcgccttgtaaagcaggaatttttcgatttttccccacgggcgtttgactgcgcaaaaagtcacccaaacgctgacatcccctcactctccgcgaccttgtacataccgtaacacagcaacgctcatccttttaaatcgctctggtatagaatgccacaaaaatagacggccatttgttgtgtaattgttattaatctgaatttccgcagatttaagacattactgccatgcagtgttactggttgatgatgaaaatcaaaaatacgctttgcttacattttctgatggcgtttctggccattttgtttctttgtcttcacccgctggtggcgagcttcgatccgccgcttaccttccagccgctgattaaatcaatggcgggcacgcctaaagaacaggcggaaaaaattgccactatttctcatgctttagaagggaatgcaattttcttcattggtgcgtctgaggtggcgacctcagaagatgaacattacgctgtctataattactttaataagcaattgcacaaacccgtcgtggcgtatggcgatgcgtttgtcgatgacgaaacgcagtttttactgttctcacgttttaaaaatagccttaacgcaaacagtaaagttgttttgctgctggcacctgacagcttttactcaaaaggcctgcctcccgctatctatgccgataatttcccgggttctgtttttactcctttaatgaaggatccgcaggcacgcccaatattggttaattatttaaaacatattgatagtaaagaaataagccatttaacctttggccaaatgcgtgtctttggctggcaccccgatctgatatgggacgaggtgagtttccagtttgccaacgtctgcaccctgataaaaaacgactggctggcgctgcttcacgtcacgccccggacggaacagccgtggccgccacagccgaccacccacattgcccctgactgggataaagagctggcgaatgcccgcgagttaaataaaaagcgccagcagagcgcggccaccctgtggatggacaaaacgatttacgaggaggacggtacgcggcagcagtgggatgacacgccggtcgtgcctgcgcaaatcgctgccttcagtaaaaccgtccagctgcttaaagaacaccacgtgcaggtgattgctatcgtcgacccggttaacccctgggcgctttacaacaccgataccttccgcccggttgataagcaaattaaaaccattctggaaaagaaccagatcccctatttagatatgtacgccatgccttatcagaatggctggaactgggatcgtttgcacccttccgaactggcctgggttcctatgattcgctttattgcacagagttttaaatgatgaaaattgcgatccgtctttttttcctttatctcctgctggcgattaccatcgtcgcatggacctctgtcgatgacagcatgagtatgcaactgcattttgaatatcaaaagttctgaggccgaatgatgtatagctcaggaatgttttttgtctgtttgttttcatccgccctggcgtttgcgctggtcaatcgcctattacgccatcgcctgacgtatttatcggccttatccgtcatggccgcattaggctggggctatatttttcagggtgattaccgtgttcccgcggtcgtttttatcagtttttatctagtcgccgcgttaaaagaaaaaggatggttaaaaacctggcaggcgattgtgttaacgctgcttcctttatttttggtgaaattgcaccttaatcatcatctcggcatgatcggcctctcttttatgacattccgcgcggtggacgtgctgctctatcgcagtaaaaaagaagggcagaatttcctgcactatttctgctatctgtttatgccctttattattctggcaggcccaatgtaccgctggcggacatggatgagcgacgtcagcaagcccgtctttgcccttaaccgcgaacagtttttagtggcgctggagcaaatcattaccggcattatccagaagttcctgtttgccatgctggttgattcgctggtcgtgcagccctggagccataagccgtttacgctgaccgtgggcgtggtgatgtcgatagcctacagcgcctacctctactttgattttgcgggctacagcaatatggccatcggtgcgggccgcctgtttgggctcaacatcccggcaaacttcaatatgccgcttctggcaaagaacccgcaggatttctggcgccgcttccacatcagcctgtctgaatggctgcgcgatgtggtctttatgcccgtttatatgaacctgatgaagttcaattttttccgtcagaacaaaacgctggcgcaaaatatcggtattttctgcaccctgttttgcatgggggcatggaatggcctggaacgccattacgtcatcagcggcgcgctgtttggcgccatttctgtcgctcacaacatgctgctgtggtcagccaaacgcagcccggcgttacaccgcgggttgcagtatccggctgttgcgtttttagggcgcattctgacgctgggaagcgccgcgggcgccctttacatctttagtggaatgtcacctctatgaaaaatctctccgatcttcaggaactgcaggatttcttgcgtgcggcattatgcgatcccgcctccccgcagcagctggccatcagcggcagcgacgaagccttaagctggctgcagctttccacggccgtgacggactgggcgcagcgctatcagcgtagccagcctgttgccggtacgccggtcgtcttgtacggacaccagcaggccgagttcgccgtggcgatttatagctgcctgctgcacaacattccgtacattccggtggactgcatttacccgcaggagcgcctgcgggagatctgccatctggccagcgccccttactattacgacgtcgcgacccggcagttcatcgccacgggtgaatcgggcaaggtgctggaggagcaggatctggcctacatcatgtttacctccggcagcaccggcaagcctaaaggggtgcagattgggcgtgaaagcgtgtggcacttcatgaaatgggtcagccaggacttttcgctgccggaaaaaccggtcctgatgaaccacgcggtgttcagttttgacctctccctgatccctttactggcaaatctggcgatgggtggacacatcgtgctgaacgccaaagacgatattcagaaagcgaactggctggagcgactgaaaagcaacgccgtctccgcctgggtttccaccccctcttttgcttaccagcagctgctttccccgcagttcaacagcgagtatttacctgaactcaacgtctttatcttcattggtgaagtgttgaataaagcgctggttaaacagcttcgccgccgtttcccgcaggccaaaattattaactcctatggcccaacggaagcgaccatcgcgaccaccgtggtcgagatcacggatgcgatcctgaacagcgacagcgccgtgctgccggtgggggtcatgatgcctgagagcagaatggaaatttccgccgagggcgagctgattatctggggtaaaaacgtcatgcgcggctacctcggcctgccgcaggagaacgcagaaaaattactccgtcgggaaaatgaagcatttcgcggctaccggaccggcgatctgggctatgaagcggggcttatttactgccagggacgcaacgacagccaggtcaaactgaatggctaccgtattgaaatcaacgaaattgaaaaccgcctgctggcaatgtccgggattaacgaagcggtggtgatgccgctgatgaaaccctgcggcagcgtgctgcgcattgccgcgttctgcgtgacggagctggcgccggataccatcaaaacctcgctctcgaaggtagtcccccactacatggtgccgtcacaaattatcgtaaaagacgctttgccgctgaatcctaacggcaaaattgaccgcaagctgctggacgcttacgcccgcacaaattaatgactccaggaaaaattatggaacaagaaattctcgccctgttcgaaaaagtgttatcccgtaaggtgggctttcacgatgagctgattgaatccgacattctcgactccatcctggcggtcgatatggttctggaagtgcaggacgtttacggctgcacgatcccgccgacagacgtggcgacggtgctgaaaaccccggcggacctggcccgctatattgaagaaaaccgctaaacgcccctgctgttaatcctgtcctgaaggctctggcgcatcgcgccagagcccagacgcaaaatgaatatccttcaccggaattaaaccaaccgcttttgtgatttctcctacactttaggggtcgtgttgttcttaacagaggagtctgcggtatggcattcgtaaccacgaaagacggcgtcaacatttactacaaagactggggtccgaaagaggctcagcctattgtcttccaccacggctggccgttgagtgccgatgactgggataaccagatgctcttcttcctggcagaaggctatcgcgttatcgctatcgatcgccgcggacatggacgatcggaccaggtgagtgaaggccacgatatggatcattatgcggccgatgcgtcagccgtggttgaaagcctggatctgcacaatgccgtgcacgtcggtcactccaccggcggcggccaggtcgcccgctatgttgcgaagtacggccagccgcaggggcgcgtcgccaaagcggtgctcgtcagcgccgtcccgcctctgatggtcaaaacggagacgaaccccggcggaacgccgatcgaggtcttcgacggcttccgcaaagcgctggcggctaaccgcgcccagttttatctcgacgttgccagcggtcctttctacggttttaatcgcgatggtgccgacgtttcgcagggtacgatccagaactggtggcgtcaggggatgatcggcagcgccaaagcccactatgaggggattaaggcgttttcagagaccgaccagacggaagatttgaaaaccatcaccgttcccgttctggtgctgcagggcgatgacgatcaggttgtgccgtataaaaatgcagcccttctccaggacatgctgctggcgaacagcgtgctgaaaatttatccgggcttcccgcacgggatgcataccacccatgcggatactatcaacgcggacattctggcctttattcgctcataacgccgcgtttcttgccgggtggcgctgcgcttatccggcctacgccacgatatcccgctcaatgcatgaacgccacccgagggtggcgttgtttattccgcttagcgattatccagctgggcgcgaacgttgttcagcccggtggtgttgatgcggtaaggctgcccgttcacggagcggatgagctttttggtgcggagttttttgaagacgttcagcgtgcagtcgctcaacaccagcccttcacgggtgtagcactcaacggacgtgacgcggccagaactgtcgcggacgtgcacgatacgcccacctttggcgagaacgtgtaaggtacgttgttcctgacgggataaattcatactggaaaacctgtgtaatcatcatgcgtaaaaaacgagcccacacccgcaggtgcgtgcgtaaggtttaagcgcagcgataaccagtccgtcctgaaaagggcgggaagctgattatctgatgaaaacattctccagcatcaaagcctcggtaagcgatgaatagatatttacgcggtgaatgataacgcctggtttttacaggggaatagcgggaggttaaaagtgtgatctggatcggtccgtgaaatcgtctttactcccttttactgccagactggggcatcttattgaacgctgactggagctttttaatgcctgactataccgtggttgaaaccgtccccgctgcggaggacttttgccgcctgcgcgaaatctcgggtcttagccctcgcccgctggaggcggcccgaaaagcgctgcccggcagctgttatggcatgcatattctgtttgagggtaaaccggtgggtatggggcgaatcgtaggggacggtgcgttgaatttcgatattgtcgacgtcgccgtcgatccccttcatcaggggaaagggctcggcagagtcattatggaaacgttggttgcctggctggatagccatgcctgcaaaggggcgtacgtttgtttaatggcggatgtgcccgagctttatgcaaaatttggttttacgctggttcgcccggcaagcgaaggaatggccagagtctggtgaagggtaaatccgcggtaggacaaaaagaaaaaccccaggttcacgagtaacttggggtttatatctggcggaagcgcagagattcgaactctggaaccctttcgggtcgccggttttcaagaccggtgccttcaaccgctcggccacacttcctgagtgaggcgaactataaacacctcaccgcgtgctgtaaagagtgccagcaatcgttcgctgtaaaaatagtcaaaatgtgtttaatcggttgaactgacaacacatcgacgattttatcagcacaggcctagtgttttttgatgtacatgtctttcgtgtaatagtaccccagcttatccggcgtaaatccgcccacccacggtttaaccaggtgcgtacgaacgtagtgatacaccggaatggcgggcacatcgcgtcccagcagatcttccgcctgctggtagaacttacctcgctcttccgttgttttggcttttgcggcattcaccagcgcctggtcgtattccggattgctgtactggctggtgttttcgctgtcgccggtgcggaagttgttcaggaacgtcgccgcgtcgtcgtagtcggcaatccaggcgtaacgcaccgcgtcaaagttgtgggtgtgcatggtatccagcatggttttccactcctgattttgcagcttcgcgtccacgccgaggtttttcttccacatggagctggcggcaatcgcgatgcgctggtgcgattcagaagtgttatagagcaggttgaagctcaggggatggctttcgttatatccggcctcgttcagcagttttttcgcctcggcgatgcgcttgtccagcggccagctggcgtaatccgggttctggagctttacgccgccaatgtccggctggctgatgagccacgccgggcgctgcccctgccctaatacttttccggcaatgatgtctttatcgagcgccatgttcagcgccttgcgcacgcgggcgtcgttgaacggcggtcgggtggtattgaattcgtagtaataggtcgccagctgcggagacacgtccagctggctgcccagggttttcttgagctgggcaaactggttgatcggcaccgtgtagacaatatcaatttcgcccgctttatagcggttcacatcggaggcctccgaggtgatgggcaggtaggtgaccttgttaatcacggtgtgcgcgttatcccagtagcgcgggttacgctccgccacgatgcgttcgttgaccacccactgcgacagcttatacgccccgctgctgacgaagtgctccggtttggtccacttgtcgccaaagcggccaatcagcactttatccaccggcaccagcgacgggtgcgccagcatcgcgaggaacgccgcatttggctgggtgagcgtcacttccagggtggtgtcgttaatggccttcacgcccagcgtgtcgggggattttttcccctgagcgatatcggccgcgttggcgatatgcatgttgcccggatagctcgcgtacggtgacgccgttttcgggtcaatcaggcgctgccagctccagaccacatcctctgcggtaatcgccgtgccgtcgctccaggtgatgcccggacgcagatggaacgtccagacggtgttgtccttgttctcccatttttccgccagccggggctggatctcacccgacggggaaacgctcaccagaccttcgaataaatcactgataatattgaattcgatgtcgctttcgactttatgcgggtcgagcgaagccggttcactgccattattcctgaccagttcctgtttatcggccagcgcggttcctgccggcacgttagccgcccaggtcgccgtgctggcgcacaggatcccggcggtaagtaaagagagcgtaaagcgcgtgcgtgtttgtggtttcatgtccttcgccttattgtctgtttttgtgacgatccggaaataactcttagcggccttatggtaataacgcaataattttcagtaacctataagaggttgatctgattaatcgcgtcaaaccgctgttcatactggtgaaacgtatttatgcagaagaaacaaccaggtcccgcgctaacctgctgagtaaagatgggtaaaaccactttgagagtgacgcgccgtttcctattctttccgttaattacatctgtcataagagagtgactcatggatcgtataattacttcctcacgcgaccgcacatcgctactcagcacccacaaggtgctgcgcaatacctatttcatgctcagcctgacgctggcgttttcggcgatcaccgccaccgccagcaccgtgctgatgctgccgtctccgggactgatcctgaccctggtgggtatgtatggtttgatgttcctgacctacaaaaccgctgacaaaccggtcggtattctgtccgcgtttgccttcaccggcttcctgggctacatcctggggccaatcctgaacgcgtatctgtccgccggcatgggtgacgtgattggtatggcgctgggcggcaccgcgctggtgttcttctgctgctcggcctacgtgctgaccacgcgtaaggacatgtccttcctcggcggcatgctgatggcgggtgttgtggtggtgctggtgggtatggtggccaacatcttcctgcagctgcctgccctgcacctggcgatcagcgccgtatttattctgatctcttccggcgcgatcctgtttgaaaccagcaacatcattcgcggcggtgaaacgaactatattcgcgccaccgtgagcctgtatgtgtcgctgtacaacatcttcgtcagcctgctgagcatcctgggcttcgccagccgcgattaagctgacctgctgaaacaaaaaggagaatgcccccggcattctccttttttatgccttaatcaccccggcaaatataggtggggtaacgccggtcctgaatcagccatacggaaggcgagagttcagagatcgtgagatagtagcgtgcggtcgggctggcaaagcttccccactgggcatcaggggtgttgtcattgtgtcgacgccaggtcttggtgtagctcaggacaattaccttatcatcgtcccgtcgctcccacgtaaaatccacgtccctgtcaacgatcaggctcttaccttcagcctttgcagcgcctttgtaggtggtcaggccggtgccgttacgatgaaaatagaactgggcaacggcattgaccttcacttcatttgcctttccttgattgcgcgtaaaattaaactcggtgctgcaggccagcgcatcgcgcttataggctccgccggtgtagataaagagcgcaaacgccccgccaacgactgcgccacccagtccgaacagaagtctgtttttcattcttccgccccgcttttatagcgaatagttttacacaggctggcttcactcaccgggcaggcgccgatgaaaacctcatcggcggcggcaagcgaaaagcgggcgctgaaataataaatgttgtactcctcgcgctcgcacgcgacgttatttttcttcagcagctcggccaattttgataacaccagcggtcggccatgatcgttgatcacccagagccgacagccagctattttttccttaacgggtttgagtgttgcgggtacggttatctcaagctgtcggctaaaaaacaggctaacccccacgactgacgtcgttaataccgctaaaaccagccaccactttttggataaacgcttatatcctgacggctgctcaacggacggctgagatacttcgggcgtaacgctctctgcgggcttaaaaataacgtcggcgtcaaagcggaatccaaaccggggcacggtcacgatatagtcgtggctgtcgcccagggcgtggaagcttttgcgtaattcacttaccgccttattgaggttatttcccgacggcgtaaagccgaactcctcccacacgcgagtgatcaactcttcccggctcaggtcgcgccctttatgacgaataaactcctgtaaaagacgaacggccggagccgaaagcgttaatacagactcgggttgcccaacaatacttattgcatgtgcttcaggatcgaataacaacgaattattgcatataaaaaacatcttttattctcggctgttaccgcatgctttttaatccctgatacaacgacaagaaaaccgcctcctgaactgattgttttttcatcagaaggagttttctccccatcccgggtcgcggtattttcgcttaactatacaaccttaaagccaggaaagcaggataaaaaactgtatataacgagttaattaatacaaattttcacaaaccgctgttctggttaaagtttccctgccctgaagcaatacgttagcagagggtgtcccgttgtgaatgcgccgggaatgaactcaacgcaggcggacagaaagtgaaacagaaaaatagtgtgaataagacaactgccttttatatcgccgcgctgtcattgccatttttctcagaaatggcactggccaatatgagcgtgtatcccatggaacttaacgtggataagtccggtgcggcgcaaattaaggtggcgtcaaaaacggatgatattcagttcattcgggtgaggcaaaagaaaattcttaatcccggcacgccccaggaaaaagagattgatgtggcctcgtggaaagaaggtggcgttgttgtcacaccggaaaaattcgcccttgcggcaggcgcaatgcgcgtggttcgcctggtatcgcttgcaccaccggaaaaagagacgacctggcgcgtctattttgaaggcgtaaagcagcctgacagcattattccgggcaaggcagaaagccctgcggcgacggcaagactgggcgtcaatgtgatctggggcgccctgatccatctcgcaccggaaaaaagcgtggtttcactgacgattgaccctctcaggggaacgttaaaaaacaacggcacgttgcgcgtgccgctcagggagatcggtgtttgtgatgcggattcatcgtgtagatggattaaagaagacgcgacgatttatccggacaccgaacggaaattaaaaacgctcacgaaggtacaaggccagaaatataaattccgctacttcaactggctgaataaaagcgctgaagaagctgatttacccgtcgtgcaataacacgacgtcaccgtaaaaaccccacagggtttgattaaagagccagggtgctcatttgtaaatatggagatatcaatgcgtaagtactttaaacctctgatgattgttgccgcgatgaccacgtccgttagcgcgctggcgattcaaaaagatattaccgtcaacgccagcgttgattcacagctggatatgacccaggccgataacacgccgctgccggcaagcatcgatatgcagtacctgcctggccgcggtctggaaagctaccgtctgaataccaaggtgtggtctaactccgccaccagcaacgtgaaagtccgtctggtgagcgccgcgaagctggcgaatgccgacggtgctgaaaccatccctatgacggtgaagctgggcgataaaaccctctctaccgcagatgttgaatacaccggtaccgaactgttcccggggagcattgaaaacggttctgcggtactgccgctgaccatttcccagaccaccaaaggcattctgaaaaccggtcagtacagcggcgttgtcagcctgatgctgacgcaggcgacgaccacggaaggcggtgcgtaacaccacagcacctaaggaataacgtcagagggtgcccaccctctgacgtcaggatgatgtcgaggctcgttcatggcgtttcatagaaatactctcctctttgttgctttgttacccgcttccatccaactcgcctgcgccgggctggccgtcccaccaggttttgaagatctggcaaagacgcagcgcctgtggacagaggtgaacctctacggcgaatcgctgggcctttttgaaacggatatcacgcttgaaacggtgagctttgtcgcacctgagaacgtggtagcggccatcaaacgccggtttaatgacgccccatccctcgttgccaccgtctctgccgcgctggccgttccgcttgcccgtaacggaaacctggcctgcagcagcaacggctccgcagcgggctgcgattacatcgataccgatcgcgcggccattatttatgacgagaataacgcccgcattaacctgttcctggacaagaaatttctgcctaagcagacggcagagaatgcatggtatcagcccacgcacggcaccgaaaatgcgctgatccatcaacaaaacattaacttcgttgccgacagggattatcagtcggccaccgtgcagggcaacggcgcgctggcgctcacccaggacggctatgtgaatctcgactggacctggctggggcagcgttcacggcaccagcagcagcaggaggtcaccgtcaacaacgcctggttccgccaggatatcctgcgtcagtactacgtccaggcaggcgagatggatacccgcgatctgttcagcaatgccggcggaaatatcaccctcagccagctgccgctgggcaaaattcgctgcctgcgcacgggttcaacacgggcgtggatgaacccggttcagcagtcgaagggaacccctgttaccgtgctgctttcccatgacgcgcgtatcgacgcccgccggggcaaccagctgctggcgagcttctatctgaatgccggggcgcaaaccctggacacgcgttcgttcccggacgggagctacaccgtgacgctctccatctatgaaaataaccggctgacgcgcaccgagcaggtgccgtttacccgaaccggcattacgccattcgaccgcgtcgagtggttcctgcaggcgggcgaaaccgataatagcgatcaaaacgaagagcgccgcgcggttgcgcaggcgggcgttcgtttgcccgtcaccccgacgctggcgctgaccagcggcgcaacgttcaagaaaaatcagcgcttcctggagaacgcgctcgactggagccggggcttcaacgcgggcccgatcgatggcgtgctgagtacccggtttagctacctctacggcagcgaaggccagcgcggcaatatccagcaaattagctacatcgacggtttttctttgagcgtctatcgaaacgcgttatccgctgaaaactgcaacacccaaagcgcgggatttgacgccgtgaacggctgttatcgcaccctctccgtgatgttctccgtcccggtcggcgcctggtatgcgagcctggggtattcggataaccgcaacgaaggccggtacgtttcacgccgggagctgccggacagtgacgatcgccacgatgcgggtttgccgtgggaatcggtctatatgacccgctcgcgcacgcgggcctggcaggctggcctgagcaatgcctttagcacccatggcctgaatattaacagcagcattaacctgttcatgcgtaacgatgacgcccgcgaaggcagggataaaggcggctacctgagcgtgagcctgtccatggcgcataaccgccagggcgatgcgtcaagctacacctctctgggcgcgacatggcagcaccagcaacgtgaaaaaaaccagctgagctacaacgtggcgcataactggtatgccgatgcccgcggcgaaaatgagtacggcctcagcgcgtcgggcattaacagcgactcgctgaatacctcagcctatacgcgccagggcggacgatatggcaacgggagtctgaccgtcagcgacgcctgggatcgtcaggatcgtcgccatacgctgagcagcagcggcaactacagctcgacgtttgcgctgtcccgctctggcctgtggctgggccgctggagcgacggtcgccctgcttccgccgtcgcggtgaacgtgaccacgccggaagatgctcaggatccgcgcgtcgccgtgtcgctggataacggcggcagtgccgatattccaggcaatagccgcgccctcttcgcggtgccgggctatcagcagacaacgttgacggttaacgaatcgctggatgtctcacgaggagccagcagtgaaatcacgcaaggatcgggcagcagaacgctgtttatggtgcctggcaaactgctgcgccgggacgtgcaaaccaccgcaagctacacctggctcggccagttaaccgacgagcgtcattcgccgtttatcggcggcgtgccgctgaacgtgaacggctggagcgaccttggcaacggcgggtttagcgcccaaagcgacgccctgctgcataacctctacctggtgcgtcagcagcagttttatcagtgcgcgctgaacgtgaagagtatgcgcgacgtggtgcgttatgtcgggtcgatcccctgtaaggagttaaccttctccgccctgccggatgccgtccagcagcaggcacagctgatgctggccggacggtcggtccctgctggaccgactgccatgaacaccgatagcctcactaaagggaaatgatgtgattaagtgcctctttatttttctgttcttaagcctgtgggccagccagacgctggcaggctctcccgcgggacgaaataccagcgtagggatcagcttcgatcgcaccgcgccgcccgcgcgttttgacatctggtttcatgaatcgggcggctttgacgccgccgatccgcaaaagtgggggcgcaataccctgacctgtcagtcccgtaccgataccacgaacggcgcctgcatgaactcaccggtctggttctcggcgaacccggccgcgccttatgccatcaatttagcgtttacccattcccttaccggcaagacggtgaatatcaaggtttatggcgatcactacatgtttatcaacaataaagtgttcacctttgccagctttgtcacgggagggacgacggaaattgctaactggaacagagagccctacttcgatttctatatcgtgaaaagcgaactggataagctcgccctgccggggatctggaccgccacgctgaagcagaacctgcgccagtggggaagcgccgactgcggcggcaacttcaatgacgtgaatgtcggctgtcctggctatctcaccatcgccaaatggcaggcaaatattcgcattgaggtggtcgacccgggaaaccagcagatttatctgccagcctttccgcactccacgcccatcgttaacctcaacctgaccaacttcccggggcgacccgggggcagcgagatcaagggggaaaacacgctggatatgtgcctgtacgacggcaaaaacagcaccagcacccgcgcctatcttcgttttgaagatgacgggcttccctcagcgggacgtgccgaaggcgcgttttctatccggcggcgcggtggaagccagacggatgcgcgggaccgtctcgactatcaggtctccgttacccatcccgtcacaggcgcaaccgaaaccgtcgcgaacggtaaaaccgtagtctggcaaggcactaacgatccgcagtatctgcgtcaggtcgtgctgcccggcggacgcgagagcgtactgtgcattcctgcgccaattatcctgaaaacccccgcgttcgccgccagcagcaaaaacgcgggcgactataccggcacgctgcgcgtcatctatacgcccagcacgttataacgaggtcactgtgagttacgccattctcgacaataatcgattttacgccgaaggactgcgctatgcgctgctgcgtcggggcgttcagttagaggtccagagcgataccgtacaatggcagccaacgctgcttacccgccgcgtgattgtcgtccgctgccgtttttccgtggcggcgacgcatcaggcgctgatcaatattttgctcaggctggaagccgcccgctggaaaggcagcctttatctggtctgcaacgaaaaggggtgggcgctggcgacgcatttacgcaagcgtttcagtacgctaacgctttatatcatcgacgaccggatcgccgttgccgatgcggcgtatttgctggcaaaagagccgcgtcgcgttcgaagcctggactgctgcctgaccgggttgccggtccgccacattgccatcgtgacgcacatgtcggagaaacaggtttcaacccataaatgcaacgcgctgaagaagctcaatgccaacaatctgcttcagctgctcctgtaggtcacggtttatcctgagcccgcttttttgctacactgtcgccgatttttcacctacgacagaagattatgttcatttttgcaggccaggaaattgagaccgatagcgaaggctatctgaaagatacgacgctctggagcgaaccgctggcggagaaaattgcggaaaacgaagggattaccctctcccccgaacactgggaagtggtgcgttttgtccgcgagttctaccttgaattcaacacctctccggccatccgcatgctggtcaaggcgatggccaataagttcggtgaagagaaaggcaacagccgctatctctatcgcctgttcccgaaaggcccggcaaaacaggccaccaaaattgccggcctgcctaaaccggtgaagtgcatttagtagcgaataccgaagttaacgtactcccggccgggttgatgcggttccgttagcaccttatcaacccgcgcgctgcgcggcccgcccgctttcagccacgccaccagcttgtcgacctgctccgcttcgccgcaggcgaccacctcaacgctgccgtcatccatgttgcgcgcgtatcccgttagcccaagctcaatcgcttcgcgctgggtactgtagcggaaccccactccctgaacgacgccgtgaacccaggcaataatgcagactttagacattcttcttctccttaacgtagcgttttcggcaaacagccgtagtgctgccggaaacgggcggtgaaacgagagctggacagatacccacattgtaatgcgatttcgccgatcggtaatcgggttgactgtaactgtgacaaagccacggccatcctcacctcctcgacaatctgacgaaaactctgtgactcctcgcgtaaccgtcttcgcagcgtcggcacgctcagggccagacggctggcgacgtcctgcgcggtccaggctctggcgggcgacagcataatgaattgtcgcacctgctcggtcaggttattgcttcgctcgataagcagcggacctgccacgccgtcatgcagcaatgccagcaacagaccgaaggcctgatgtttttgcagcgcctccggtaactcctgacgcacggcgtgcagcaggttatcccacataaacgccagcccctcgctcagcggagcgcagagcgaatgcagcgtcgtgcgcggccaggatttcaggtaatgcgctttaaactcggcaacgatttccggcgataacatcagcaagtccgagtgaaacagaccgtttgcaggctgattgatgatctccattgccgtattggcagggataatgatgagttcatcccgggtgaccaccaggcggttatcgtcctgcacaatcaccttgctgccgtgagtgatatggcaaatcgccgggaaaaagagcttaacctggtgcaggcgatgcattttgctggcactcacttcacccgccgtgagatgtttatgtcgaaaatggaactcctgcacctcgccatccttatctgctgtaggttgcggttaactgcgcctttgccagaacgtgactattgagcataaagccgaccagcgcgccgctcgcattgttgtcgatgggcagggtatccacgtccagcgcccagacggtcatctgatagcggtgaggcttgtccccggcaggggggcatgcgccgccgaatccagaataaccgaaatcattacgcccctgcacagcgccagcaggtaatttttcgccatttgggttaccggcatcagcgggcagcgtcattgtcttcacgggaatgttggctactgtccagtgccaccagccgctgccggtaggcgcatccgggtcatagaccgtaatggcaaaacttttcgcacccgtgggcgggcttttccacgccagctgcggggactggttaccaccgtggcagccaaatccctcaaacacctgctgtggcgctaaccgccggtcgccggaaatatcccggctggtcatgctgaaaggcgttgcggctaaaacctgaaaactcattgccgtcagagcggctattgtgatgacactgcgctttttcatgggtatttcctttgctgaaccggaatcccactgtatatcccgccgcagtgccgtaatgtgcttaagcgatttgattttgtgccgaaacgctcaacggcatccgcagatgattgcgccttgctgaatgtgctactctacgcgccatttccctgaaatcgacagaacagcaaattatgagtgtacgtttagtgttagccaaagggcgcgagaaatcattactgcgccgtcatccctgggtcttttccggcgcggttgcccgtatggaaggcaaagccagcctcggtgaaaccattgatatcgttgaccatcaggggaaatggttagcgcgaggcgcctactcgccagcctcccagatccgcgcgcgcgtctggaccttcaataaagacgaaaccattgacatcgacttcttcgtgcgtcgtctgcagcaggcgcagcagtggcgcgactggctggctaaacgcgacgggctggacagctaccgcctgattgccggtgaatctgacggcctgccgggcgtgaccatcgatcgcttcggtaacttcctggtgctgcagctcctgagcgccggggcggaataccagcgcgctgcgctgattagcgccctgcaaacgctgttcccgcagtgcgccatttacgaccgcagcgatgtggcggtgcgcaaaaaagaaggcatggagctgactcaggggccggtcacgggtgaactgccgcctgccctgctgccaattgaagagcacggcatgaagctgctggtggatattcagggcgggcacaaaacgggttactaccttgaccagcgcgacagccgcctcgcgacgcgtcagtacgttgccgacaaacgcgtgctcaactgcttctcctacaccggtgggtttgccgtttcggcgctgatgggcggctgtgcccaggtggttagcgtggatacctcgcaggaagcgctggacgtggcaaaacagaacgtcgagctgaacaaactggacttgagcaaagccgaatttatacgcgacgacgtcttcaagctgctgcgtaaatatcgcgaccagggcgagaagttcgacgtcatcgtgatggatccgccaaagtttgtggagaacaaaagccagctgatgggcgcctgccgcggatataaagatatcaacatgctggctatccagttgctgaacccgggcggggttttgctcaccttctcctgctccggcctgatgaccacagatttatttcagaaaatcatcgctgatgccgcaatagatgctggccgtgatgtacaatttatagagcagttccgtcaggcagccgatcaccccgtgattgctacctacccggaaggactgtatctgaaagggtttgcctgtcgcgtcatgtaacttgaaaagagaaatattgcccgcacataacgtgtaagtcgtatttcccgggaggtgactatgattgccagcaaattcggtatcggccagcaggtccgccacactttgctcgggtatttgggtgtggtcgtggatatcgacccggagtattcccttgatgagccgtcagcagacgagctggcggtgaacgcagagcttcgcgctgcaccctggtaccatgtggtgatggaaggtgacgacgggcaacccgtccacacctaccttgccgaagcgcagctaagcagcgagctgcaggaagagcatccggagcaacccactatggatgaacttgctcagactatccgcaaacagttacaggctccgcgcctgcggaactaagcgtgtaaaaaaagcccgatgaacgggcttttttttattacttcgccagccccagacgggggatgtcgatcgccggacagcgatccatgacgacgttcagccccgcatcccgcgccagcacggcagcctgctcgttaatcacgcccagctgcatccacagcgttttcgccccgacggcgatagcgtcctgcgccacttcccacgccgcctcggaattacggaagacatcgaccatatcaattttttccggcacgtcagcgagcgtggcataaccctgctggcccagtaaggttttccccgccacttttggcgagaccgggatgacgtgatagccctgatcgagaaggtatttcatgacccgatagctgggacgatcgggtttatcgctcgcgcccaccagcgcaatggtacgcgtggatgtcagaatctcggcaatatcgttctctttcatggtttttctcctggcttttttaaaagtgtacgccaaaccgcacatctcaaccatccatcccataccgatgcatgagggcaaaacgcccaaatatgtctatatgttagtaaacgtgattatcgaaaaatttagatacattaatgcggcgacaggatttctgacgggagccttctatgaaaaccggtattgccactgctctgattgcattagtgatgccggtctgcgtttttgcgaccacgctccggctctctaccgatattgatcttctggtactggacggaaaaaaggtctccagttcgttattgcgcggtgcggacagtatcgagctggataacggaccgcatcagctggtattccgcgtagaaaaatcgatcggtctggccaatcacgagcaacggatgtacatctccccgccgttgatcgtcagctttaatacccgacaaatcagtcaggtgaatattaccctgccacgccttgaaacggagaaggaatcagcggccttcgacgcgtctccccgcattgaactgctggacggggatgcgatgccgattccggcgaagctggatattctggcgctgacgacttcaccgaaaggtccggactacgaggccgcgacgcagacctataacaaagccggtaaacgcgcgtcgcttcctcagtttgccaccatgatggccgacgacagtacgctgctttccggcgtctctgaactggacgtcattcctccccagtcccaggccctgacggaacagcgccttaaattctggttccagcaggccgatgccgacacgcgggcccggtttttacaatgggcaaaacaacaaccttcatcataagccacattttttacgcctttctcttgcagcatcagacggttcccgtcatcgtgtaggcagttaacctgatggatatgattatggaactgacaacacgcacgctcccggaacgcaaacatattgctctggtagcgcacgatcactgtaaacaaatgctgcttaactgggttcgccgccatcagtctttgctggaaaagcacgccctgtcggcgaccggcaccaccggtaacctgatccagcgcgaaacgggtctggaggtaaacgccatgctgagcggcccgatgggcggcgatcagcaggtcggcgcacagatttccgaagggaagattgatgtgctgatcttcttctgggacccgctaaacgcggttccgcacgacccggacgtcaaggccctgctgcgcctggcgacggtgtggaatattccggtggcgacaaacctctcgacggcggatttcatcatcgaatcgccgcagtttaactcgccggtagatatccttattccggactatcagcgttatctttcagagagattgaagtagctttttttgccgggtggcggctacgcccttacccggcctacccatccatgcccggcggcgttacggcttccgcgccactggcacatcaatgctcttcaaaatatcgacaaacacggatggctcttctttattgaacagcagccacacgcgatggcgcgcgcgggtcatcgccacatacagcaaacgccgctcttcggcatccggaaagtcttccggcaccggcagcagggcctgctccatgaccgactcgcgggccggggccgggaaaccgtcgctcccctctttcagccccatgacaatcacatagtcggcctgctgccctttgctggcgtgaatcgtcataaattcaagctgcagcttcggccagcgggtggccgccttttccagcgcctcgggtttgaggtgatggtatcgcgccagcaccaggatacgttcatcaggcttcgcgtagccgctgagcttgtccagcagcggttccagctggtcttccgccagcagggtcacggcttttttatcccctgcccgcaggctattgagcggctttgccagctgatgcgggttctgctggataaagcggttggcgatttcaccaatccgtgaattgaagcggtaggtggtgtccagatcgctgcgatcgccttcgccaaaatagtggtggaacgcggtcgtcagcgaaagctgcgccccgctgaagcgatagatggcctgccagtcgtcacccaccgcaaacagcgaggtatgcttattttgcgcacgcagcgccgcaagcagggctgcgcgctgcggagagatgtcctgaaactcatccaccagaatatgtttccacgggctgacaaagcgccccttctccagaatgatgatggcctggtggattaggccggaaaaatcgacggcattttccgctttcagcgcggttttccatgccttcagcagcggcgccatcagcttgacccgcttcgaaaacagatcgcggatcgcctccggcgcgctttcaatcatctctgcctgcgttccgccgtgcattcgcatcaggctgacccagcggtcaagccgtgaacccagccgacgcgccagtttgtcatcctgccagaagctgccctccggcacgtcccagttgagttcctcctcgagccactgacgccaccctttcgcctgcgcctttttctcactgcactgctggcgccacgttttgataaacagcgcctggcgcgcctgcgcgtcgttttccagcttactgatagcaggcacttttttactgccctgctgaataatatgcagagcaagggcatggaaggttctggccgtgatatcccgagtatgcagacgttcctggatccgttcgtccatctcctgggccgccttgcggccaaaggccagaagcagaatttgatcggcgaccgcttccccggtcgtcagcagccagccggcacgcgcgaccagcaccgacgttttaccgctaccggcccccgccagcaccagcagcgactgctcgccgttgaccaccgcgcgcgcctgagccggattaagcggagaagactccaccgtactgaaaaagtcggcgtattgggtgagcatggcgtccgtccaggcctgattatgggcgagtcggcttttatccttatcattcagccaggcctggcactggcgccaggcgtcgcgacaattgtcaaactcctctagacgcgccacggataacggcagcgccgagagtgcctgccggatcttttgctgcaacccggcggtctgctgacgggtgagccacgaatgctgcgcgttgctttgcgcgatatcgtccagcaccttttgaagcactccggcggcaatcacgctcatatcctgactccactgctgccagagcgcgttcaggtgatggtggaaacgctgggtttctgcccactcggtgccgtgaagacgcacgactttatcgtcaggcagaacgaactcgagttcgccccacaccagcccgcgtttgcagtggatagccagaagctgattaaacggaataaggtattcgtggcgttccccggagacttttaccccggcattaaggagaaccacccggtcgtaagggtgttgcgccagacgtttgcctaacgacgttgctttcagttccatgttccgccaaatccacaaagagataatttacctgacagtgtaactgccagttttaaggtgctccagcctaaaaaaacgttacaatcattgggcgttaattttatcgaaaggaagtgagggtttatgcgtaccgttctgaatgtgttgaattttgtgctgggcggttttgccaccaccctttcctggctttttgccacgctggtgagcatcgtcctgatttttacgctccccctgactcgctcctgctgggaaatcacaaaactctccttcgtcccctacgggaatgaagccatccacgttgacgagctgaatccggagaacaaaaacgccctgatgaatacgggcggaaccctgctgaacattctgtggctgattttcttcggctggtggctctgcatcatgcatatttttgcgggtattgcgcagtgcatcacgattattggtattccggtggggatcgcgaactttaagatcgccgctatcgctctttggcccgtcgggcgcagggttgttccggtcgaagtggcccaggcggcgcgtgaagctaacgcgcgtcgtcgttttcagtaactaaggactggccgcgtttatgctaagcccactgcttcgccgttatacctggaacagcacctggctttataacgtcaggatatttatcgctctttgcggcacggttgccctgccctggtggctgaatgacgtcaagctcaccatcccgctcacgctgggcgtcgtggccggggcgctggcggacctggacgatcgtctggccgggcgtttacgcaacctggtcatcacgctcgtctgcttttttattgcgtcagcgtccgttgagttacttttcccctggccctggctgtttgccctgggtctgacgctctcaaccagcgggtttattttactgggcggcctcgggcagcgctatgccactatcgcgtttggcgccctgctgattgccatctataccatgctgggcgcatccctctacgaccagtggtaccagcagcctgttctgctgttgctcggcgccatctggtataacctgctgaccttaaccggtcatctgatcttcccggttcgtcctctgcaggacaaccttgcccgcagctttgagcagctagcccactatctggaactgaaatcccggctgttcgacccggatatcgaggaagaaagccaggcgccgctctacgatctggcgctggcaaatggtcaactggtcgccacccttaaccagacaaaagcctctctgctgacccgtctgcgcggcgatcgcggtcagcgcggaacgcgaagaaccttacactactattttgccgcccaggacattcatgaacgcgccagctcctcgcacgtccagtatgccgccctgcgcgagaagttccgctacagtgacgtgatgttccgcttccagcgcctgctctccatgcagtcccaggcgtgccagcagctctcgcgctccattctgctgcgcacgccctatcagcatgacccacgttttgaacgcgtatttagccatcttgatgcggcactcgaccgcgttcaggccagcggaacgtcaccggaacacattaaagcgctgggctttctgctgaacaacctgcgggcgattgacgcacagctggcgaccatcgagtccgagcaggcgatggcgcttccgggcagtgaagtcgacaatcagcttgctgatgacagcgtgcacagttttagcgatatgtggctacgcctgagccgcaactttaccccggagtcggctctcttccgccacgcggtgagaatgtcgctggtgctgtgcgtgggttatgcctttatccagataaccgggctgcatcatggctactggatcctgctgaccagcctgttcgtctgccagccgaactataacgccacccgacaccgcctggcgctgcgtattatcggcacgctggtcggcgtcgcaatcggcctgccggtgctttatttcgtgccttccgtcgaagggcagctgattctgatcgtgatcaccggcgtgctgtttttcgcgtttcgcaacgtgcagtacgcccatgccaccatgttcatcacgctgctggtgctgctctgctttaatctgctgggtgaagggtttgaagtcgccctgccccgcgtgattgatacgctgattggctgcgcgattgcctgggccgcggtcagctttatctggccggactggcgttttcgcaatttgccgcgcgtggtagacagggcgatgaatgccaactgtcgttaccttgacgcaattctggagcagtaccaccagggccgcgataaccgtctggcttaccggatagcacgtcgcgacgcgcacaacagtgatgctgaactggcctccgttgtctctaacatgtcaacggagccgggcgccacggccgagattcgtgagacagcgttccgcctgctctgcctgaaccatacctttaccagctatatttcgacgctgggggcccaccgcgagaagctcactaacccggcggttctcaacctcctcgatgacgccgtctgctatgtcgatgatgcgcttcatcaccgcccggccgatgaaccgcgcgttcgacaggctctggatgaactggctcaacgcattgcgcatcttgacccgggaaatgacagcaaagcgccgctggttcttcagcagataggcctgctgatcgctctgctgcctgaaatttgccgtctgcaacagcacatcgctacctggaggaacgattctcctgcggctcaggcagcgcattaaaccactccgtcagctcccggcggatacctgccgggagtgccgcctcatgcagcccttcgattgccccttccagcgcaaagagcacttttatactgagtgccttattctttgcacgcatcttcagccagctcgctctggcgcccagcgcccgcagcgtttcttcattggtgataccggcttcaaagagcaagacttcaagctgaaaggtcaggttcggcagatccttaagacgggttcgttgatgacgctggtagcgctctttccttgccgcactgagtgcaaacgaggagagctgaagcaaccgctccctgtcctgccataatccgtcatccacacgataatagttgagcagcaccgggcggcctcgcttcatcaacgtcaagaaggaggaagcattttttacacagtattttgcactctcttcacacgcgcgaaggtaaagttcgccatcggacaccatggcaaagaccgcatcatcgaccgccagggtgtaaccgccaaacagcgcgcgatgatgaatctcgcccaacggagagaggtattcctgggatttataaatccgttcataagatatctttttcatgatatttcccttcaaaatcataggctaacaacgaaatttcttactagcggatccgttagcaggaaaataggcaacttatcgtcgttgagcaagatgatttttcgaggggcatcaagattgaatgaattttgcgagtcgctttccgaaaatgaggttgatctttgggcatacaggggttactgtatatccatacagtaactacagggctggaatgaatatgcacacttcaggctatgcaaatcgcgcaacctctctctcttctgccgcaggcaatgtcgcgcagaattccgtcgagcgtgtttccacagggcttatcagtgaagtggtttatcgtgaagaccagcccttgttaacgcaacttcttttactgccattattacaacaactcggtcagcaatcgcgctggcagctttggctcacgcctcagcaaaagctgagtcgcgagtgggttcaatccgcaggccttccgctgaccaaggtcatgcagattaatcaactttcgccttgcgataccgttgagtcgatgatccgcgcgttacgcacaggaaattacagcgtggtgattggctggttaccggaagaattgacggaagaggaacatttccgactgactgaagccgctgaagaagggaatgcgatcgggttcattatgcgtccggttcgatcggattcttaccgcagaggacaactttcagggctaaaaattcactcaaatttgtatcattgagtgaaattaagatttttcctggaattttttttgaccgcaagatgggattttagttcccggccttaaaattgcggcaaggcttgtctggtgcggttctccttaattttattgcacaaaattcgttcaaaaaatgttaaataatcggtatacggaactttttttttcatatgcctgacggacttcacacttgtaagttttcagctacgttgtagactttacatcgccaggggtgctcggcctaagccgaagatatcggtagatttatatttgaccacgccccccggtgaaggatttaaccgtgattctctcttgagactttcatggcgaattttggatgataacgaggcgcaaaaaatgaaaaagacagctatcgcgattgcagtggcactggctggcttcgctaccgtagcgcaggccgctccgaaagataatacctggtatgcaggtggtaaactgggctggtctcagttccacgacaccggctggtacaacagcagcctgaacaatgatggcccaactcacgagagccagcttggtgcaggtgcgttcggtggctatcaggttaacccgtatgttggttttgaaatgggttacgactggttaggtcgtatgccatacaaaggcgacaccgtaaacggcgctttcaaagcacagggcgttcagctgaccgctaaactgggttacccagtaactgacgatctggacgtgtacacccgtctgggcggcatggtatggcgcgctgactccagcaacagcatcgctggcgacgaccatgacaccggtgtttccccagtattcgctggtggcgttgagtgggctatgacccgtgacatcgctacccgtctggaataccagtgggttaacaacatcggcgacggcaacaccgttggtgttcgtccagacaacggcatgctgagcgtaggtgtttcctaccgtttcggccagcaggaagaagcagcaccagttgttgctccagcgccggctccagctccagaagtacagaccaagcacttcactctgaagtctgacgttctgttcaacttcaacaaagcgactctgaaaccagaaggccagcaggcactggatcagctgtacacccagctgagcaacctggatcctaaagacggttctgtagtggttctgggcttcaccgaccgtatcggttctgacgcttacaaccagaaactgtctgagaaacgtgctcagtctgttgttgattacctgatctctaaaggtatcccagctaacaagatctccccacgtggtatgggcgaagctaacccagttactggcaacacctgtgacaacgtgaaagctcgcgctgcactgatcgactgcctggctccagatcgtcgcgtagagatcgaagttaaaggcatcaaagacgttgtaactcagccagcggcataagttatcgtcttataaaaaaaccccgcaatgcggggttttttattgtctgatgaaaagtaaaaaactactttttacccaacagcgcctgaaggtcattcttcagtgtcgacatctggttagcgtacttctctttatgttctgcatcctcaatcaactgcacgatggtttccgacagcgttttaccccgtcgttgtgccagcccggccaggcgctgccagacaacaaattccagatcgattgattttttgcgcgtgtgctggtgctcagcattaaaatgccgtttgcgtcgcgcgcggatagtttgcttcatccggtttaacaacgcaggattaatgtgtttctcaatccagccgttgacctgtaccggttcgttttcgagggtcagcaaaatatccacggcttcttgcgcagcgctggcttcgatgtagcaggtgatcagctccccttcacggtgctttttgaccaggtacttccatttccagccgctttcgagattttccagttgttgatatttcattgcgatctcagtgttaccacgtaactctgttcagaatatcagttttttagcaatctgctgaaaagaaatcatatcctgtgagtcaatgcagccaatcaccctgtcgaaatccccaatcctgcttgggtagagccccccgcttacggtatactccacgcttttacatctgactaaaaaacatcaactttgaccattacgaaacttgcatggcgtgaccttgttccggataccgaaagttatcaggaactgtttgcacagccagatctcgcaaaagaacacgaattcatccttagcgatacgcagccccgtttgcattatgcgctggagcaggtattaagcccctgggcaactgcgcctttcatgctgctcaaagccccggaagaagcggaatacctgacgttgttcggggatgccgtgcgtcagctaaagccggaagcgaacgccgtttttggcggccagtatcgtatcgctggacatgatgttactttcgaaccggcggcgcaggccgacggcctttttgccgctaagggcgaggtgattaccgcgaactgggtcgaggctgaacaactctttggttgtctgcgccagtttaacggcgagctttcgctgcagcctgggctggtacatcgcgcaaatggcggtgtcctgatcatctcgctgcgtaccctgctctcgcagccgctgctgtggatgcgtctgaaaaccatcgtgcatcagcagcgtttcgactgggttggctacgatgagtctcgtcctctgcctgtctcggttccgtctatgccgctgtcattaaccgtcgtgctaacgggcgaccgtgaatcgctggcagacttccaggaaatggagcctgaactggctgaacaggcggtgtatagcgaatacgaagacaatatccagattgccgatgccgacgatatggcgcagtggtgccagtgggtgatggccgttgctgaacgttttgcgctgccaacgcctgcggctgacgcatggccaggcctgatccgcgaagcggtgcgttataccggtgaccaggaaacgctgccactctgcccgctctggatcggcaaacagctgcgtgaagtgggcgtggtgagcggtagcggtgcgttcaccggggagcagctcacccagatgctggctcagcgtgagtggcgggaaggctatcttgctaaccgtatgcaggatgaaattctgctggaacaaattctggtggaaaccgaaggcgaacgcgtcggacagatcaacgccctgtcggtgattgaattccctggccatccgcgcgcgttcggggagccgtcccgtattagctgcgttgtgcatattggcgatggcgagtttaccgacatcgaacgcaaagccgagctgggcggaaacattcacgccaaaggcatgatgatcatgcaggcgtttttgatgtctgaactgcagcttgagcaacagatccccttctccgcctcgctgacgtttgagcagtcctacagcgaagtggatggcgatagcgcctctatggctgaactgtgcgccttaatcagcgctctggcggaagtgcccatcaatcagaacatcgcgatcaccggttcggtggatcaattcggtcgtgcgcagcctgtgggtggcctcaacgaaaaaattgaaggcttcttctctatctgtcagcagcgcggtttaaacggcaaacagggtgtggttattccggctcccaacgcacgccatttaagcctcagccaggagattctggatgcggttgaacaagagcagttcgctatctgggccatcgaagggattgaggatgcactacccttactgacaaacctggtatgggatggcgaagggcaaaccaccctgatgcagactatccaggagcgcattgctcaggcaacacagcaggatgctcgtcaccgttatccatggccgttacgctggctgggctggtttagttcgaactgatcggacttgttcagcgtacacgtgttagctatcctgcgtccttcactaaaataaggcttactgagaacatggtagataaacgcgaatcctatacaaaagaagatcttcttgcctctggtcgcggtgaactgtttggcgcgaaaggcccacagttaccggccccgaacatgctgatgatggaccgtgtcgtgaaaatgaccgaaaccggcggcaacttcgataagggttacgtagaagcagaactcgatatcaacccggacctgtggttcttcggttgccactttattggcgatccagtaatgcctggctgtctgggtctggatgccatgtggcagctggttggcttctatctgggctggctgggtggtgaaggtaaaggccgcgcgctgggcgtaggcgaagtaaaattcaccggccaggttctgcctacggcgaagaaagtgacctatcgtattcacttcaagcgcatcgttaaccgccgcctgattatgggcctggcagatggcgaagtgctggtagacggtcgtctgatctatagcgcaagcgacctgaaggttggcctgttccaggacacgtccgcgttctgatcgtgctttcgcacctccagaaaggcgaaacctccgcattgcggaggtttcttttttgaaagagacgttatcaggctatgagtgccctgtcgccgatggcttctcgccagcctccaagccattgtgacctttgatttatcgtctgataaggacacatttctttagaacgtccagcgatgccggcctgataaccacgttgatgagcccgttccaggcgatctcgtttctgtctcttcatgcctcgtttccctcattcttttgtctggtggaaagaaaacagtgtctgcactatctgcacaggcacagataacgaataccccgaattagtcgcatcgtcaatgttcaaaattcatacgggtgtcatatttgtgagctagctggaagttcatttgtacaaaaattgtgacgtggcacaagtaacaacctgagttgaaaacgaaaaaaaaccgcaatcagcgacagaccgattgcggtttctgatgatgaattttacttatggcagccgggaaatctctctcgcgatactggccgactcctgcgcccatccctgagccaggactttcaccatttcgtcatagccatctttctgctgcttcagctccagatggaaaggacgcttaatcagctgcccctgatggttcagcaaccactccccgctgatgaccactgcaccgtcataacggccgtggaagcccgttacggtgacgttcagcgtatcctgatcgttacccagcggctgcgatgcgactacccaccccggaagctggctgcccaggttagccaccagcgtgttgcgcagctgctgatccagcgggctggcccacaggttgttggccgcaatcacgtatttcacgtcgctggtctgatagaccacgccgtttcctgccagataatccggcacggcgacctgctcaacccacagctgacggttcccctggctcgccgtgctttgcccaccgctgtgggttgccacaggcagctgataatagcttttattatctccccctgaactgcatgccgttaacagcagagcgccaaccatcaatagccattttttcattcttttgccctcttcggctcaggatcctttttatctttcgcttcgaacaccagcgcattgctcttctcgttgagcgttttcagcaccggctgcagttcacgcaggacctgatcaagacgctgcatatctgccaccatcttgttataggccgctgatcccggctggaagccctgcatactgcggttcagctcacgcagcgttttctgcatgtcctgcggcagctgctgcatactctggctcgccgtaatcttgttgatgttatccagcgtggtttgcagacggcgcatcgttgcctggctttcgctcagcgagtttgttgccgcttcaatcatcggattcagtggcagattgttgatcttatccagcgtctccatcagacgctgctggatctgcgccagaccgctgctcaccgttgggatgatcttgtagccaccgaattcacggataccggtaatcggcggtgctttcgggtagaagtccatatccacatacagcgcaccggttaccaggttgccggttttcagcgacccgcgcagaccgcgttccatcagctgggtgatatgagtcgcgatatcctgattttcaccaatctgattaagcagacgctctggttcaatgcggatcagtaccggaatgcggtaatcatcatccagcacctgctgaaggcccggaacgaagaacggcacttgcccaaccgtaccgagacgaatgccgcggaactcaacaggcgcccccggctgcaggccgcgaacggagtctttaaagaacatcaggaagtcaacgtgatcggtatagagcgcatcctgaatgcttttttgatcgtcaaagagacggaaagcggtgttctctgcgaccggctgccctaaatccaggccctccggcacgtcaaagctcacgccgccaccaaacagcgtggtcagcgaacccatttcaacgcgcatgcctgccgaagtcagatccaccgcgatcccgctgtctttccagaagcggacgttgctggtgaccaggcgatcgtttggcgcattaatgaagagctgatagctgatcgcgcgtttctgtggatcaaacgtgcttttctcaaccgaaccgacgcggtagccgcggaacagaaccgggtcgcccgccgtgagctgacccgcttttttactgtcgaggatcacgcggatgcccttggcatcaggcggtgcaagcggcggtgaatccagaagctggtattgggctggctggttacccttagcccccggctgcagctcaatgtaggcacccgagagcagcgtccccaggccgctgatcccttcacgccccacctgcggcttaacgacccagaaaacggaatcgccgtgcagcagtttttccatgccggcattcaggcgcgccttaatctccacatgggttaaatcgtcggtcagggttgcgctttccaccacgcccacatccacgctacggcttttgatggtcgttttaccgccctcaatcccctcggcattggtggttatcagcgtcacttccggcccctgatggctgtaatgataaaacaggatccaggcaccgatcagcgcagtcacgatgggaaaaatccacaccggagaccagtttttgaccttctgcactttcgcctctccactcttattttccatgctcttactcttcctcatggcttgattcaggctcacgatcccacgataaacgagggtcgaaggtcatggccgcaaacatggtcatgatcacgaccagtgcaaacattaaagcccccatcgcaggataaatactcatcaaaccgcccatccgcaccagcgcagagagaacggcgatgacaaacacgtcaatcattgaccagcgtccgacaaactcgaccacttcataaatcaggtgcatgcgttcgctgtcgcgtttcccatgaccttttgcatcccaacagagccaggcgatggcgatcatttttaaggtgggcaccataatactggcgataaagatgacgccagcgaccggataggaaccttcaccccagagcagtatcaccccggccaggatcgtcgagggcattttgtcgccgagcaaatcggtgatcatgattggcagaatattggctggcagatacagcatgacggacgtgaccagcagcgccatcgtccactgcaggctatttttacggcgcacgtgccctttcgtttcgcagcgcggacaaacgtcgagatcggcgggcagcacggcggtacagcacgggcacgagcgaagcccctggcgaatgccgggcacgccgaccttcaccgtctgcgcaagcgtcggtgccggggcgatatcatcccacgcccagcgtctgtccacgcactggaaagcgcgcagctgcaggacgcagtacagacaccagggaataaagctgctgccaatccccacgtcgccgtacgccatcagcttcacgaaactgaccaggatccccgccagaaagatctccgccatcccccagcttttgagctgaaacagaatacgcgcaagtcggattttcagcggtgccggcatcctgacgcggttcaccagcaaaaggataacgaccaggcaaaaagccgggactatctggacaaacaggagaaagaaggtccccagactggcgtaatcttccgagaacatcacgcccgggatttcaagcagatccacctgactggtgatcccccccaccttcatgtagatgaaggggaagagattagagagcagcagcataaacagtgctgccagcgcgtaagcagtgggacgctgccgcggcgcgtcccactcggttgtcaacgtcgcgccacagcgtggacacagggctttatgtccgtgaccaagctctggcaacgccacgagcatatcgcattgcgagcataaaatatgcctgtcggcatggtgctggtcacacatatgttatccctgtttatgcgccgtttttcagagactcaaggtactcccagcgctcaaaggcgtcttccagggctttttcagccgcggacatttcagccaatactttctgagtatagtcatgcgattgggtaaagaatgacgcatcagcaacctgtttttgcagatcctcaagcgcagcctccagctcttcaagacgctgcggtagcccctccagttcgcgctgcaggttatagcttagtttagccgaggttttcttgacagtttctgcttttgttacagcaggttcagaacttattttggactttgactgcttcgtcgccagcgactgtgcctgctgcccttttgcatcgtgataaccgccgacatattgaccaattcgcccttcaccttcgaagatccagcactcggtcacggtgttgtcaacgaactgacgatcgtggctgaccagcatcacggtgccctgataaccgtcaatcagttcttccagcagttccagcgtttcgacatccagatcgttggtcggttcatcgaggatcagcaggttgcttggcttcaggaacaggcgcgccagcagaagacggttgcgctcaccgcctgacagcgcgcgcaccggcgtcatggcgcgcttcggatggaacagaaagtcctgcaggtagcccagcacgtggcgcggcttgccgttcaccatcacttcctgcttgccttcggcgaggttgtccatcaccgtacggtccggatccagctccgcgcggtgctggtcgaagtaggcgacctccagcttggtcccgcagtgaatgcggccgctatcggcctgcagctggccgagcatcagtttcagcagcgtggttttaccgcagccgttcgggccgatgagcgcaattttgtcgccgcgctgaacctgcgccgagaaatagttcaccagcactttaccgtcaacctgatagttaacattttccatttcaaagacaatcttgccggaacgggacgcctcttccacctgcattttggcgctgcccatcacttcacggcgttcgctgcgctcgcgacgcatcgccttcagggcgcgcacgcggccttcgttacgggtacggcgggctttgatgccctggcggatccagacctcttcctgcgccagcttgcggtcaaactccgcattctgcagctcttccacgcgcaggttttcttctttctccagcagataggtgtcgtaatcgccaggataggtcaccagcttgccgcggtcgagatcgacaatacgcgtcgccatattgcgaataaacgaacggtcgtgcgagataaagatgatggtgccgctgaaggttttcaggaagccttccagccagtcgatcgcctcgatatccaggtggttcgttggttcgtccagcagcagcaccttcggcccgctgaccagcgcacgacccagggccgctttacgcagccagccgccggagagcgccgacagctccatgtcgggttccagaccgagctgcgccagcacttcattaatgcggttttcaagctgccacagaccgtggtgatcgagcatctcctgcacttttgccagttcgttgaggtttttgtcgctcggatcggtcatcaccagatgcgaaatctcgtgatagcgcttcaggtattcagcctgctcggagatcccttccgccacgaaatcgtaaacgctgccggtcacgtgacgcggtggatcctgctgcaggcgggagacaatcagatcctgttcgtaaacaatgcgtccgtcatccaggccctgttcacggttaaggattttcatcagcgtggatttacccgcgccgttacggcccaccagacagacgcgctcgttatcttcgatgtgcagttctgcattgtcgagaagcggtgagtcgctgaaagagagccacgcgccgtgcatactaattaaagacatttatttttcctttcagaccgcggtaatcaaccagcagttatggatttgacggttacgggcaaagtcctgagacagcgttttttggctgatttcttgtgctttcagtcccagggctgctaagccgtcatgatccatacggaagccgcgtttgttgttcgagaacataatggtgccgcctttacgcagcaggcgcttcaggtcggtcatcaggcgcaggtgatcgcgttgaacgtcaaagctatcttccatacgcttggagttggagaaggtcggcggatcgataaagatcaggtcgaactgctcgtcggtgtcgcgcagccagcccagcacgtcagcctgcatcaggcgatgctgacgcccggttaagccgttaagacgcaggttgcgctccgcccactccagataggtgcgggacatatccaccgtggtggtgctgcgcgcgccgcccagaccggcatgcacgctggcgctgccggtataggagaagagattcaggaagtccttgcccttgctcatctggcccagcatgcggcgggcgatacggtggtcgaggaacaggccggtatccagatagtcggtcaggttgacccacaagcgggcgttatattcgcccacttcgataaagtcgcccttctcgcccattttctggtactgatttttgcctttctgacgttcacgggttttcagcaccagcttgtttggcgcaatacccagcacggcgatggtggcggcaataacgtccagcatgcgctgacgcgctttttgcgcatcaatggttttcggcggcgcatattcctgaatcaccacccagtccgcgtagcggtcaaccgccacgttgtagtccggcaggtcggcatcatacaggcggtagcattcaatgccctcctgcttcgcccacttctcaaatttcttcaggttcttgcgcagacggttagcgtaatcttccgccacgccggacggcttgctgtcggccgccttctccgccagatggtagtttttctgcatgcagtccagcgggccgtttttcgccttaaactggcggtcggcacgcagctgcaggcagctcagcagttccggcgaggcgctgaacagagacaggttccagccgccgaagtggtccttcatgttgcggcccagcaggctgtgcagggcaatcaacgccggttcgctgtcgagacgttcgccgtagggcgggttgctgatcaccgtaccgtacgggccttttggcagcgggttggtcaggtttgccacgtcttttacttcgaaggtgaccagctcgccgataccggcacggcgggcgttgctgcgcgcgcgctcaatgacgcgagggtcgctatcggagccgtagaaatgagaggtatattccgccagccccttacgtgcgcgggtctgcgcgtcgtctttgacctctttccagagcgcttcatcatgctgcgcccagcctttgaagccccactggccgcgatgcaaccccggggcgcggtcggtggccagcatggccgcttcaatcagcagggtaccggaaccgcacatcgggtcgagcagcggcgtgcccggctgccagccggagcgcatcacaatggcggccgccagggtctctttgatgggtgccatgccggtacgatcgcggtagccgcgcaggtgcaggcccgcaccgctcagatcgagagagatactcgccgtgtcgccgttcagccagacgttaatacgcagatccgggttttcacgatcgacgtttggacgttccttatttttacgcgtaaagcagtccacaatggcgtcttttacgcgcagggcaccgtactggctgttgcggatctcgtcgttcacgccgttgaaatggaccgcaaaggtggcattcggggtgaagatctctgtccagtcgatcatctgtacgccggtgtagaggtcaaggtcgctataaaccttgcactccttcatcggcagcatgatgcgcgacgccaggcggctccacatcaggctctggtaaataagccgcgtgtcgccctcaaaatggacaccaccctgaaccacctgacactcttgtgcgcccaggctttccagttcagtttttaacagctcttccagcccacgggccgtactggcaaacagagaattcatatcgtcacttttactcttagaaaattgtcgcgcattatagctaatatggcgtgtatgtcataaagttgaaggcttattttcattcgagggagtgtgcagtggcgacgttatccaggctttttattcatccggtgaaatccatgcgcggcatcggcgtctctcacgcgctggccgacatgagcggattcgccttcgatcgcatttttatggtcaccgagcctgacggtacgtttattaccgcacgccagttccctcagatggttcgctttaccccttccccgcttcacgacggtttgcatcttaccgcgccggacggttccagcgcggtgattcgctttgctgattttgcgcccgtcgatgcgccaacggaagtgtgggggaaccactttaccgcgcgcatcgccccggatgaaattaaccgctggttaagcggcttcttctcccgtgacgtgcagctgcggtgggttggacctgaactgacgcgtcgcgtgaagcgacacgacgccgttcccctctccttcgccgatggcttcccgttcctgctgacgaacgaagcctcgctgcgcgatttacaaggccgctgcaaagccagcgtgcagatggaacagttccgtccaaacctggtggtgacgggtgccgaggcctgggacgaagatacctggaaagtgatccgcattggcagcgtcatttttgacgtggtgaagccctgcagccgctgcattttcaccacggtaagcccggagaaaggccagaagcatccttccggcgaaccgttgaaaaccctgcaatcattccgcaccgcgcaggataatggcgatgtcgatttcggccagaacctgatcccacgctccagcggcgcgatccgcgtcggcgatgaggtcgaaattcttgctcgtgggccagcaagagtgtacggctcgggtcaggaggaggagtttgtcgacgttgagacgaacgtcgcctctgcggtagatattcactggcagggcaacgtcatccggggtaacaaccagcaggtactgcttgagcagctggaacaagcggggatccgcataccctattcctgccgcgcgggcatttgcggatgctgtcgtatcagactggtggatggcgaagtgagtgcgttgaaaaagtcggcaattggaaatgacggcacaattctgtgctgtagctgcgtcccgaaaacgtccgtacagctggaagcttaaaccgcctgctcgaggctgaaggcatccacgcgaagctggggcttcagcctgtcgttcatgaccttaatggcatccccgagctgcatcgtccgcccggcaatcgtcacgccaggctgggccagcaggcagagcgcggcattttcgcctggctccaccaccagcaggctcacctcttctgcggtatcgctcaggttgacgctggccgcatcgcccgttgccggggtccagttcatgccgtgcggcaggaaatgccagctctttggcatttgcggcttcaggaaacggatagccaccagcgcatttaataccagctcggcgcgctgctctttcgagagcatcagatcgcgacatttttcctcaaaggagaaataaagcgcagcgtcatcaacgcaaaagcctgacggggaaaaagcgtccggggttaacattcggcgggcaaaacgagagcgaaataacatgccattggctaagtcgagcatcattcggtcatgctcgtcgcaaaaataccagcgccagttatcgtcaggtttaattcgcatgtttctctcccgtccccgaaacgtcctgtactaaaaatgtcctgtttgccgcttcgtttataacaccattaataaaagactataatgtctaaataagcaacagtgacggaatataaaacaaccagggctggaaataaagccccggttgtctgattacgagaaaagattagatatgcgtaacgatttctttaatcagcggcggtcctttaaaaataaagccggaatagatttgcaccagtgacgcacccgccgccatcttctcacgcgcagcaatcacggagtcaatgccgccgacgccaataatcggcaggcggccatttaattccgcagacagggaacgaataatttcggtgctttttaattgcaccggacggccacttaacccacccgcttcgtcacagtttttcattccctgcacgagggaacgatcgagcgtggtattggtcgcaattacaccatcaatattatggcgaaccaaactgtcggcaacctggatcaattcttcggcagaaagatccggggcgatcttaaccgcgaccggaacatatttgtggtggatcgcctggagttcattttgcttatttttaatggcactcagaagatcgtccagcgcttcaccatattgtaaggatcgcaggcccggggtattgggtgacgaaatattcaccgcaatataaccggcataggcgtagactttttccatacaaatcagatagtcatctttaccctgctcgaccggcgtgtctttatttttgccgatattgatgcccagtattccgtcaaagtgggctttttttacgttctcgaccaggtgatcaacaccgtggttgttgaagcccatgcggttgatcagcccttcggcttccaccagtcggaacaggcgcggtttgtcatttcccggctgcggacgcggggtgacggtaccgatttcaatggagccaaagcccatcgcgcccagggcatcaatgcactcgccatttttgtccagaccggccgccagacccagcggatttttaaaagtcagccccatgcactgcacaggttttaccggcacatgctggcgcaccagcgcggccaaaggcgtgccggtaatacgacgtaattgctggaatgtcaattcatgagcgcgctcagggtcgagctggaaaagggctttacgaacgaaggggtagtacatgaactctcctggattcccggtgtgcaaaccgggaggggattatgggcgatcccatcgcgaaagggaattgacctgcggcaaaaaaaaccgcgtaaaacgcaatcgtttacctccccgtccatttcttatgcactttttcgcattttaattgcagataaatcatttagtggaataaacgcgcggtgtcacactccttaaaattgttatgaatgttagataaaagcaaacaattagttataaggagaaagtatgcgcgtcattaccctggccggaagtccacgattcccttcgcgctccagcgccctgctggaatatgcccgtgaaaaactgaatgctctggatgtggaagtgtgccactggaacctgcataacttcgaacctgaagatttgctctacgcccgtttcgacagccctgcgctgaaaaccctcattgagcaacttaacggcgcggacggcctgatcgtcgcaacgcccatctataaggcctccttttccggggcgctgaaaaccctgctcgatctgcttccggaacgcgcgctggacggcaaggtggtgctgccgctggcaacgggcggtacggttgcccatttactggccgtggattatgccctgaagccggtgctgaacgcgttgaaagcgcaggagatcctccacggcgttttcgccgatgactcgcaggtcatcgactatcaacacaaaccccactttacgcctaacctgcaaacccgcctcgataacgctctggaaacgttctggcatgcccttcaccgaagaaatatccaggccccggcgtttggtcagcctcaaggagtcgcacatgtttaaaacgttaacccgcatcggactggcaggtttgatggcacttacctcgctggcccatgccgcagaaacggctccggaaagtttacgcatcgggtatcagaaaggcagcgtcagcatggtgctggcaaaaagccaccagcttctggaaaaacgcttcccggacaccaaattctcctgggtggagttcccggccggcccgcagatgctggaggccctgaacgtgggcagtatcgatctcggcagcacgggcgatatcccacctatattcgcccaggccgcgggagcggacctcctctacgttggcgttgagccgcccaagcctaaggccgaagtcattctggtgccagaaaacagcgacattaaaagcgtcgccgatcttaaaggtcataaggtcgctttccagaagggatccagctcacacaaccttttgctgcgagctctgcaagaggccgggcttaagttcaccgacattcagcccgtttacctgacacctgccgacgcgcgcgccgcgttccagcagaagaacgttgatgcctgggccatctgggacccgtactactccgccgcattgctgcagggtggcgttcgcgtgctgaaagacggtaccacgctgaagcagaccggttcattttatcttgccgcgcgcccttacgctgaaaagaacggcgcatttattcagggcgtgctggatacctttacccaggccgatgctttgacccagagccagcgtcaggagagcattgccctgctggcgaaaaccatgggcttacctgagccggtgatcgcgagctatctcaaccaccgtccgccgaccaccattacgccggtggacgcacacgtcgccgcacttcagcaacaaacggctgacctcttctatcaaaaccgcctggttccaaaacaggtcactattcgcgaacgcatctggcaacccgcaggcaaagaaggagctaaatcatgagtctgaatcttttctggtttttacccacccacggtgatggacactatcttggtacagaagagggttcacgcccggttgaccatggctacctgcagcagattgcacaggcggcggaccgaatcggtttcaccggggtgctgatcccgaccggacgatcatgtgaagatgcctggctggtcgccgcgtcgatgatcccggtcacccagcgcctgaagttccttgtcgcgttacgcccgagcgtcgtctcccctaccgtggcggcacgtcaggcggccacgctggaccgactgtccaacggccgcgccctgtttaacctggtgacgggcagcgatccacaggagctggcgggcgacggcgtgttcctcgaccataccgaacgctatgaggcctccgccgaattcacccgcgtctggcgacgcctgctggaaggggaaaccgtcacctttaaaggcaagcatattcacgttcgcgacgcgaagctctacttcccgccggtgcagcagccgcgcccgccgctctattttggcgggtcgtcggatgtggcccaggatctggcggcggagcaggtcgacctctatctgacctggggcgaaccgcctgagctggtgaaagaaaaaatcgctcaggtccgcgccaaagcggccgcccatggccgcaaggtgcgcttcggtattcgcctgcacgtgattgtgcgtgaaaccaatgatgaggcctggcgggcggcggaccgtctgatttcccatctggacgatgagaccatcgccaaagcgcaggccgcgtttgccaaaaccgactctgtcgggcagcaccggatggcctctctgcacaacggcaagcgcgagaatctggagatcagcccgaacctgtgggcgggcgtcggtctggtgcgcggcggtgcgggtacggcgctggtcggcgacggcccgaccgtggccgcgcgcatcaatgaatacgccgaactgggtatcgacagctttattctctccggttatccgcacctggaagaggcgtacaaggtcggcgagctgctgttcccgcatcttgatgtcgccattccggaggttccgcagccgcagcagctccagctgcagggcgaagccgtggcaaacgaatttattccacgcaaagccgcacagagctaaggagggaccatgtctgccacctcacaaaaatggctgctgcgcgccgcgccgtggtttttacccgtcggcattgtggcgctctggcagctcgcatcgtccaccggctggctgtcgagccgcattctgccctctccggagggcgttgttgaagcgttctggtcgctgagcgtcagcggagagctgtggcagcatctggcgataagctcctggcgcgccgcgatcgggttttccatcggcggcagtatcgggctggttctgggtctggtgagcggcctttcacgctggggcgagcggctgctggatacctccatccagatgctgcgcaacgtgccgcatctggcgctgatcccgctggtcattctgtggtttgggattgatgagagcgccaagatcttcctcgtggcgctgggcacgctgttcccgatttacatcaacacctggcacggcatccgcaatatcgatcgtggtctggtggagatggcgcgcagctacggcttatcgggtttttccctctttgttcacgtgattctgccgggcgccctgccctccattatggtcggggtgcgtttcgcgctcggcctgatgtggctgacgctgattgtggcggaaaccatctcagccaactccgggattggttatctggcaatgaacgcccgcgaattcctgcaaacggacgtggtggtagtagccattatcctttacgccctgctcggcaaactcgccgacgtcagcgcccagtggctggagcgcagctggctgcgctggaatccggcctatacccttcaggaggcgaaagcatgaatactgcacgactgaatcaggggaccccgttactgctgaacggtgtcaccaaacgctacggcgataacagcattcttaacgggctggatctgcatattcccgccggacagtttgtggccgtagtcgggcgcagcggcggcggcaagagtacgctgctacggctgctggccggactggaagcccccaacggcggcgacattctggcaggaacgacgccgctttcgaatattcaggacgatacccgcatgatgttccaggatgcacgcctgctgccgtggaaatcggttatcgacaatgtcgggctcggtcttaagggtaactggcgggatgaagcccgccaggcgctggccgccgttgggctggaaaatcgcgccgatgaatggcctgccgcactctcgggtggacagaagcagcgcgttgcgctggcgcgggcgttgattcaccgtccgggcctgctcttgctcgatgaaccactgggcgcgctcgacgccctgacgcgaatcgaaatgcaggatttgattggttccctctggcagacgcacggctttacggtactgctggtgacgcatgacgtgagcgaagccgtcgcaatggccgaccgggtgctgttaatagaggaaggaaaaatcggtctggatttgacggtggatcttccacggcctcgtcacgtgggctcggcaagactggcggagctggaggcagaagtgctggatcgggtgatgaaacgcgggagcacggagttacagcgagctaaggctaatgcctgatgccctcacccccggccctctcccacagggagagggagggtaaacttttattacgctaacgctttagcaatcttctcgtacagatcgccagacaggttttccagccctttcagttgctcaagcgcggcacgcatcttcgcctgacgcttctcatcgtagcgtttcagacggattagcggctctatcagacgcgacgccacctgcgggttacggctgttcagctcggtcagcatttccaccatgaactgataaccgctgccgtcttcggcgtggaacgcggcggggttgctgctggcaaacgcgccaatcagcgagcgcacgcggtttggattgctcagggtaaaggaacgatgcttcagcaggctgcgcaccttgctgagcgcatcggccgccgggctggtcgcctgcaggatgaaccacttatccattaccagaccatcctgatgccacttgtcgtcatactcctgcatcagcgcatcgcggcacggcagttcggcggcaacgcttgcgcccagcgcggccagcgcgtcggtcatgttatccgcctcgtgatactgcttgctcaccagggtgttcgccagctcggtttcaccaaacgccagatagcgcaggcaggtgttacgcagagaacgtttaccaatgtccgcgtgctcaacgcgataagcgtcaagcttgttggcgttataaatggcgaggaactcgtccgccagttcagcagccagcgtacgggtcagcgcttcacgcaccgccacgatcgcgatcggatcgataatctcgaacaactccgcgatttccgttgctgacggcagggtcagaatttcagcggccagcgccgggtcaatcttctcatccagcaggatcgcgcggaacgcgtcagccacgtgaacaggcagcgacagcggctgaccctgctggtgacggtttacgttgatcttgatgtaggtcgccagcaggctttgcgccgcatcccagcgggagaagtcgttgcgggcgtgacgcatcaggaacgtcagctgctgatcgctccacttgtactccagcttcaccggcgcggagaattcacacagcagcgcaggcaccggctggaagtagacgttatcaaagataaaggtctgctcggcctgggtcacgttcagcacgtggtgtaccgggtggccgcccttctgcaatggaatgactttgccctcgttatcgtacagctcgatgctgaacggaatatgcagcgggtatttctcttcctgctctgccgtcggcggcgtgcgctggctgatggtcagcgtgtactgctcggtttccggattgtagtcgtctttgacggtaacaactggcgtaccggcctggctgtaccagcggcggaagtgggaaagatcgacattagaagcatcttccatcgcctgcacaaaatcgtcgcaggtggccgcgctgccgtcatgacgctcgaagtagagctgcatccctttctggaaattctcttcacccagcagggtgtggatcatgcggataatttcagcgcctttctcatacaccgtcagggtgtagaagttgttcatttcgatgactttatccggacggatcgggtgcgccattgggctggcatcttctgcaaactgcaggccgcgcatggtacgcacgttattgatgcggttcaccgcgcgtgaacccagatcagagctgaactcctggtcacggaagacggtcaggccctctttcaggctcagctggaaccagtcgcggcaggtgacgcggttaccggtccagttgtggaaatattcgtggccgatgacgcgttcgatatcgaggtagtctttatcggtggcggtatcggtgcgcgcaagcacgtatttggagttaaagacgttcaggcctttgttctccattgcgcccatgttgaagaaatcaacggcaacgatcatatagatgtcgaggtcatattcgaggccaaagcgctcttcgtcccacttcatggagttgatgagcgaggtcatcgcccacggcgcgcggtccaggttaccacggtcaacaaacagctccagcgccacttcgcggcctgagcgcgttttgaaggtatcgcgcagcacgtcgaagtcccccgccaccagcgcaaacaggtagcacggtttcgggaacggatcctgccactgaacccagtgacggccattctccagctcgccttcgcctacgcggttgccgttggagagcaggaaggggtacagggttttatcggcgatgattttggtggtgaagcgcgcgaggacgtccgggcggtcgagataccaggtaatgtggcggaacccttccgcttcacactgggtacacagcgccacgcctgactggtaaagcccttccagcgcggtgttggcggccgggctgatttcattcacgatgcgcagcgtaaactgttccggcaggttgtcgatgaccagctggttgttttcttctttatagtctgaccaggcttcatcattaatatgcagggagaccagcgtcaggtcttcgccatccagacgcagcggcacagcagttgcgctgtggcgcgtcacctgactcaccgccgtgacaacggttttagtggcatccaggtcaaaagtcagatcgatttcgctaatcagataatccggcgcacggtagtcgtggcggtatttggcttgtggctgttgtgtcatagaaaaccttatgcatcgtttgtcgagtaacgtttcaatatattcctgttgcgcaaaacgcgctatgcagaatgttcatcttttcagggtcaatacctttttttgctacatttgtataatatgaactcatagtttttaaaatcgataaagatcgtccaggagcgctttaaacatgggatgagcgagatcgagataaagcttgattaacgaactttaacgaacttcacagaccacttttgccccatccatgccccacgcataattttagtcagcgccagaccacatcagccctgtagggctaatcgataacaaacacgccagcagtacgttccccaaaatttaaaaacaagttgttcatgccttgacagacaaaaccgccaaagcaaaaatactgtatattcaaacagtgattagcggagcatttatgttcgtagaactggtttatgacaagcgtaatgttgaggggctcgaaggggccagagagataattctggccgagctgacgaagcgggacattaagcctgccttactggcaggcttaatggcaaaaaactttaggggcgtagctcagttggtagagcaccggtctccaaaaccgggtgtcgcgagttcgagtctctccgcccctgccatatagaatcctttgcttcggcaaaggattttttttgcctgaaagactgtaaaacgcctcttcttactattcagccagcattcctgctggctgatgtattaatccattacattgatttttaacagatcttttatctgcgactgcttatcactgttttgcagccaaatcgcatacagcggtctggtaagcgtggtggaatccattacggtatgcagcccagctttagtgtctgcccagcgaacaggtaaccaagtacaacctctcagcaagggcagttgctgacaggcgatctctgcagagctggtcgttaactgtgggacgtcatcaggtgcaatcaagcccgtctcatgctgctgaaaatcaggcccccattccaggcgcaaataggtcaggtctgccttcatcatcgaaggttcagaggcataaagcgccaggccaaactggcccacaatctggctgctaaattcgtccatcttgggggcttcggttgtgataagaagatcaagctggcgctcatgaagttgcttaaccagcgactgccgttgcgcaatcctggcttcaaattgcaggtggctatgagattgataaagccgggtaagccactgacttagcatacattcccacagggaagcgctggcccctatcgagaactcattatgcctcgatgtatgtgcaacctctttgcgtgccgcctgccaggtattcatcagcgtttctgcgtacggcagtagtttttcgccggcgggcgtgaggcggatattgttgcgatggcgggtaaaaagattcacccccagttgattttccagctgtcgaatacgaaaactgactgctgactgcgtcaggtaaagggcttcagctgctcgcccaaagtggcgtgttctgctcacttcaaggaaagttttaagcaattccgtatccacatctttctccgcaaaattatttgtcgttatgatttaaatgttttgttttacactctgtcaagcgtaactaatactccgcgccataaatagctcggccaaagaattaggagcgtgtaggatggcggaaagctttacgacgactaatcgttttttcgacaataaacattatccgcgcgggttctctcgtcacggcgatttcaccatcaaagaagctcaactgcttgagcgccatggttatgcctttaacgagctggatctgggcaagcgtgagcctgctactgaagacgaaaaacagtttgtttctgtttgccgtggtgagcgtgagccgcagtctgaagcggaacgtgtgtggatcaagtatatggcacgcattaagcgtccaaagcgcttccatacgctgtctggcggtaagccgcagatggaaggtgcagaagactacaccgagtctgacgactaagatgataagaaggggctacggcccctttttttatgccagcaacttctgcaggtgcagcagcaaacgatcgatagcgcgataactcagcgcctcctgcaagtgtttcctctcaatgtcagtacatccctccacgtcagcaatggttctggccacttttagcaaacgttgccacgcacgtatagacagcccaaagcgcgtcaacgtctcctcaagccatcctgcatcttcactattaagcgaacaaaactgccggatcccggcattatcaagccgagcattcagcctgttttggcgggtgtattgtcgtgcctgggcagcgatcacccgctcgcgcacttttgctgagctctcacccgttatgcccgtctgcctgagcaggcccggcggcggaagggggatttcgagagacaaatcgaaacggtcgaggaatgggccggaaagctttcccagatagcgcagcgtctgctctggcgtacagcggttatggttgccctgataatgccccgtggggctggggttcatcgcagcgaccagttgaaattgcgcaggatagcttattttggcccgcgtgcgcgagatatgtatttcaccagattcaataggttctctcagtgcatccagcacgcgacgctcaaactcaggcaactcatcaagaaacagaatgccattgtgtgccagtgaaatctcacccggtccggggatagacccaccgccgaccattgccgtcagtgaagcgctatgatgtggggaacgaaaagggcgacggcgccactgtttatgcaacgatgccgaactgatgaggctatatatggcggcgctttccagcgcttcatgattattgagcggcgggagcaacccgctcagcctgctcgccagcatcgttttacctgtaccaggcgggccaatcagcaggagattgtgtccacctgcagccgtaatctccagcgcccgtttaccttgctcctgtcccatgatctcactgagatcttctggcgcatctgctatagcctcgtcgcactcctccggctcggacagttcatgtcggccttccagccaggcacacacttcctgaagatgcccggcgataagacaccccttttcggcaataagactcacttctgatgcgttttcattggcgacaatgatttgccgccctgcacgaatggcttccagcgctcccgatatcgcaccgggaacgcctctcaatgcgcctgtgagcgcgagttcacccacgaactcgtacgagcctagcctggtcgtagtaagctgctcagaagccgcgagaagcgcaattgcgataggtaaatcgtatcgcccgccctctttgggcagatcggcgggggcaaggttgatggtgatcttcttcgcggggaaggtataaccgctatttattattgcgctgcgaacgcgatccctggcctctttaaccgtcgtttcaggtaacccgacaagcgtgagtccgggcagcccattactcaaatgaacctctacggaaacaagcggtgcctttaccccgagagccgcacgcgtataaacaactgacagtgacatttgcactacctcctggtgtgactatgccagtacgcgttatgcctgtttagcgctatttagcgaatttacgctgcctgttcagggattttaaaagcacaatgaaactattgcacaatcgtggaaccctcctcgcagagcgaaaaaaacctgttttgacggttagcggaggagtaaaaaagtgaaaaatattcattttctaatttccgtatataaaacaacgattttaagaaatatgattcgcgggctaaccaaatccgtcataaataaatcttgtgtttgatttaaaaactgtgataactctttaggtattccttcgaacaagatgcaaaaagaactgaaaatgacagcccttctacgagtgattagcctggtcgtgattagcgtggtggtgattattatcccaccgtgcggggctgcacttggacgagaaaaggcttagaaatcaagccttaacgaactaagacccccgcaccgaaaggtccgggggtttttttatgactaaaaaacgtaaatgaggagcagagaatgacaagtagcacaaaattctgtttctcccgatttatgacggggaactaactatgaatggggcacagtgggtagtacatgcgttgcgcgcgcagggagtcgagacagtattcggttatccgggtggcgcaattatgccgatttacgatgcactgtatgacggcggcgtggagcacctgttgtgtcgacacgagcagggcgcagcgatggccgccatcggttatgcccgtgccaccggtaaaaccggtgtctgtatggcgacctcaggtccgggcgcaacgaacctcatcaccggtctggcagacgcgctgctggattccgttcccgttgttgccatcacgggacaggttgcctctccgttcatcggcaccgacgcgttccaggaagtcgatgtactcggtttatcgctggcctgcaccaaacacagttttctcgttcagtctctggaagagctgccgcgcgtaatggcagaagcattcgaggttgccagctccggtcgccctggtccggttctggtcgatatcccgaaagatatccaggtcgcacacggcgaactggagccgcacttctccaccgttggaaacgacgacgcgtttccgcatgcggaagtcgaagaggcccgtcagatgctggcgcaggcgaaacagccgatgctgtacgttggtggtggcgtaggtatggcgcaggcggttcctgccctgcgcgaatttatcgcggcaacgcaaatgcctgccacctgcacgctgaaagggttgggtgcggtagatgccgattacccctactatctgggcatgctggggatgcacggcaccaaagcggcaaacctggcggtgcaggcgtgcgatctgctcatcgccgtaggcgcccgttttgacgaccgcgtcaccggtaagctgaatacctttgcgccgaacgccaaagttatccatatggatatcgacccggcggaaatgaacaagctgcgtcaggcgcacgtcgcgctgcagggcgatctcaacgcgctattaccggcattgcagcagccgctggatatcaacgcgtggcgtcagcacaccgcagacatgcgcgccgagcacgcctggcgttacgaccatcccggcgaggccatctacgcgccgctgctgttgaagcagttgtccgaccgtaagcccgccgacagcgtggtgacgaccgatgtcggccagcatcagatgtggtccgcccagcacatgacctacacccgtccggaaaacttcatcacttccagcgggttagggacgatgggcttcggtctgccagccgcggttggcgcacaggttgcccgcccgaacgataccgttatctgtatctccggtgacggctccttcatgatgaacgttcaggagctcggcaccgtgaagcgcaagcagttaccgctgaagatcgtgttgctcgataaccagcgtttagggatggttcgccagtggcaacagctgttcttccaggaacgttacagtgaaaccaccctgaccgataaccccgatttcctcaccctggccagcgccttcggcattcctggtcagcacatcacccgtaaagaccaggttgaagcggcactcgacaccatgctgtcaagcgaagggccatacctgcttcatgtctcaatcgacgagcttgagaacgtctggccgttggtaccgcccggtgccagtaactcacaaatgctggagaagttatcatgatgcaacatcaggtcgccgtgcaggctcgcttcaacccggaaacattagaacgcgttttgcgcgtggtgcgtcatcgtggttttcagatttgctctatgaatatggagacggccaccgacgcgcaaaacatcagtatcgaattaaccgttgccagcccgcggccggtcgacttactgtttagtcagttatcaaagctggtagacgttgcccatgttgccatctgccagagcacaaccacatcacaacaaatccgcgcttaagcgtgacaggacgaaaaaatgacgacaaaaaaagctgattacatttggttcaacggtgagatggttcgctgggaggacgcgaaggtccacgtgatgtcccacgcgctgcattacggtacctccgtgtttgaaggcatccgctgctacgattctcacaaagggccagtggtgttccgccatcgcgaacacatgcagcgtctgcatgactcagccaaaatttatcgtttcccggtttctcagagtgtggatgagctgatggaagcctgccgcgaggtgatccgtaagaacaacctcaccagcgcctatattcgtccgctggtcttcgtgggcgacgtcggcatgggcgtgaacccgccagccggttacaacaccgatgtgatcattgccgcgttcccatggggtgcctacctgggtgctgaagcccttgagcaggggatcgacgcaatggtctcttcctggaatcgcgttgcacccaacaccatcccgaccgcggcgaaagcgggcggtaactacctttcttccctgctggtcggcagcgaagcgcgccgtcacggctaccaggaaggtatcgcgctcgacgtgaatggctacatctccgaaggcgcaggtgaaaacctgtttgaagtgaaagacggcattctgtttacgccgccattcacctcgtccgcgctgccgggcatcacccgtgacgccatcatcaagctggcgaaagacctcggtatcgaagtgcgcgagcaggtgctgtcccgcgaatccctctatctggccgatgaagtatttatgtccggtaccgcggctgaaatcaccccggtacgcagcgtagacggcattcaggtgggcgaaggccgctgtggcccggtgaccaaacgcattcagcaagcgttctttggcctcttcaccggcgagacagaagataaatacggctggttggatcaggttaatcactaaatataaatttgggacggcacgcaccgtcccattacatagtcagacgggagtaaataaagcatgcctaagtatcgttcagccaccaccacccacggccgtaacatggccggtgcccgcgcactgtggcgcgccaccggaatgaccgacgccgatttcggcaagccaattatcgccgtggtgaactccttcacccagttcgtaccgggccacgtgcacctgcgcgatctcggtaagctggttgccgagcaaatcgaagcctccggcggcgtggcgaaagagttcaacaccattgcggtggatgacggtatcgcgatgggccacgggggcatgctctattcactgccgtctcgcgagctgatcgccgactcggtagagtacatggttaacgcccactgcgccgatgcgatggtctgtatctccaactgcgacaaaatcaccccggggatgctgatggcctccctgcgcctgaatattccggtgatcttcgtctccggcggtccaatggaagcggggaaaaccaagctctccgacaaaatcatcaagctcgacctggtcgatgcgatgatccagggcgcggacccgaaagtctctgacgagcagagtgaccaggtggagcgctccgcgtgcccgacctgcggctcctgttccggtatgttcacggcgaactccatgaattgcctgaccgaagcgctgggcctctctcagccgggcaacggctcgctgctggcgacccacgccgaccgtaagcagctgttccttaacgccggtaaacgcatcgttgaactgactaagcgctactacgagcaggacgacgccagcgcgctgccgcgcagcatcgccagcaaagcggcgttcgagaacgccatgaccctggacatcgccatgggcggttccaccaacaccgttctgcacctgctggccgccgcgcaggaagccgaaatcgacttcaccatgagcgacatcgacaggctctcccgtaaagtgccgcagctgtgtaaggtcgcaccgagtacccagaagtaccatatggaagacgtgcatcgcgcgggtggcgtcatcggtatcctcggcgagctggatcgcgccgggctgctgaaccgtgacgtgaaaaacgtgcttggcctgtcgctgcctgagtcgctgaaccagtacgacgtgatgctgaccaaagacgacgcggtgaaaaagatgttccgcgcgggccctgctggtattcgtactacccaggcgttctcgcaggactgccgctgggataccctggatgacgaccgcgccgaaggctgcatccgctcgctggagcatgcctatagcaaagacggcggcctggccgtgctgtacggtaactttgcggaaaatggctgcatcgtgaaaaccgctggcgtggacgacagtatcctgaaattcaccggtccggcgaaggtgtacgaaagccaggatgaagcggtagacgccatcctcggcggcaaagtggtggaaggcgacgtggtggtcattcgctacgaagggccaaaaggcgggccgggcatgcaggagatgctctacccgaccaccttcctgaaatcgatgggcctcggtaaagcctgtgcgctgatcaccgacggtcgtttctccggcggcacctccggcctctctatcggccacgtctcgccggaagcggcaagcggcggcaacatcgccatcatcgaagacggcgacatgatcgaaatcgacattccgaatcgcggcattcagctcaagctgagcgaccaggagatcgcggcccgtcgtgaagcgcaggaagcgcgcggcgataaagcctggacgccgaaagaccgccagcgtgaagtttccttcgccctgcgcgcctacgcgagccttgccaccagtgcagataaaggcgcggtgcgcgataaatcgaaacttgggggctaacgatggccgagtcgcaacccttatccgccgcccctgagggggcggaatatctcagggcggtgcttcgcgcgccggtctatgaagccgtgcaggtcactcccctgcagaaaatggaaaaactctcttcgcgcctcgacaacgtcatcctggtgaagcgcgaagaccgccagccggtgcacagtttcaagctgcgcggtgcctacgcgatgatggccgggctgaccgacgagcagaaagcgcgcggggtgattaccgcctcggcgggcaaccacgcgcagggcgtggcgttctcgtctgcccgtctggggctgaaagcgctgatcgtgatgccggttgctaccgccgatatcaaggtcgacgcggtgcgcggtttcggcggcgaagtcttgctccacggggccaactttgacgaagcaaaagccaaagcgattgaactggcgcagcagcaggggttcacctgggtgccgccgttcgaccacccgatggtgattgccgggcagggcacgctggcgctggagctgctgcagcaggatgcccatctcgaccgcgtctttgtcccggtgggcggcggcggtttagccgcaggcgtggcggtgctgatcaaacagctgatgccgcagatcaaagtcattgccgtggaagcggaagactccgcctgcctgaaagcggcgctgaatgccgggcatccggtcgacctgccgcgcgtcgggctgtttgccgagggcgtggcggtgaagcgcattggcgacgaaaccttccgcctgtgccgggaatatctcgacgatatcgtcacggtggatagcgacgctatctgcgcggcgatgaaggatctgttcgaagacgtgcgtgcggtggcggaaccctccggcgcgctggcgctggcgggcatgaaaaaatacatcgcgcagcacaacatccgcggcgagcgtctggcgcacgtgctttccggtgccaacgtgaacttccacggcctgcgctacgtgtccgagcgttgcgagctcggcgaacagcgtgaagcgctgctggcggtgaccattccggaagagaagggcagcttcctgaagttctgtcagctgctgggtggacgttcggtgacggagtttaactaccgctttgccgatgccaaagacgcctgcatttttgtcggcgtacgtctgagccgcggcgtggaggagcgcaaagagatcctcaacctgatgcatgagggcggctatagcgtggtcgatctctccgacgacgagatggcgaagctgcacgtgcgttacatggtcggcggccgtccttccaagccgctcagggaacgcctgttcagctttgagttcccggaatcgccgggcgcgctgctcaagttcctgcacacgctgggcacgcactggaacatctccctgttccactaccgcagccacggtaccgactacggccgcgtgctggcggcgtttgaactgggcgagcacgagccggatttcgaaacgcggctcaacgagctgggctatgagtgtcacgatgaaacccacaacccggcgttccgcttcttcctggcaggctaagggctgagcggcatgtaggccgggtaagcgcagcgccagccggctttagtggttcggcagtatcgtccagaacgcatcaataagcggctcatgcagccgctttttttgtgcgcacacgccaagctcaaacggcgttttctcgtcgctgcgctctaaaatcatcacgcgattgcgcaccggctccgggctgttttccagcaccacttccggcagcagcgccacgccgcagccgagtgccaccatcgacaccatcgcctcatggccgctgacggtggcgtaaatcgacgggttgctgattttctgacggcggaaccacagctctatacggcgacgcaccggtccctgatcggccatgataaacggcaccgtggaccagtccggtttttccaccgatacctggttacgcaccgggcagggcagcgccggggcaatcaacaccaccgccagattttccagcatcgagaacgctaccgcgcccggcagggtttcaggcttcccggcaatggcgagatccgcttcgcctgtcaccactttttccatcgcgtcggcagcgtcgccggtagtgagcttaatttcaaccgacggatgcgccgcgcgaaagcggtcaaggatgggcggcagatggctgtaggcggcggtcacggagcagaaaatatgcagctcaccggagagtgacggcccctgctgatcgatagagtgccgcagctgctggtactgcaacagcgtctgctgggcaaaaatacgcagctcttcgcccgcttccgtgagggtgacggtgcggttatcgcgcacgaacagcggctggccgaggtcttcctcaaggcgctggatctggcgcgaaagcgtggaggggctgacgtgcatcgcccgggcgctgcggccaaagtgacggctttccgccaggtgcaggaacattttcagatcgcgtaaatccaccgattccactccctctttttacattgcataaattgcaatgtgacgttgtgaatatatcaatttccgcaataaatttcctgttgtaatgtgggtacattctcgctgaaacgcgaaccgaacaataagacacacaacatcacgaggtatcacccatggctaactactttaatacactgaacttgcgccagcagctggcgcagctgggcaaatgccgcttcatggcgcgcgatgaatttgccgatggcgcgagctaccttcagggtaaaaaagtggtcatcgtcggctgtggcgcacagggtctgaaccagggcctgaacatgcgtgactccggtctggatatctcctacgccctgcgcaaagaagcgattgccgagaagcgcgcttcatggcgtaaagcgaccgaaaacggcttcaaagtgggtacctacgaagagctgatcccgcaggcggatctggtggttaacctgaccccggacaagcagcactctgacgtagtgcgttccgtacagccgctgatgaaagacggtgccgcgctgggttactcccacggctttaacatcgttgaagtgggcgagcagatccgtaaagacatcaccgtggtgatggtggcaccgaagtgcccgggtaccgaagtccgtgaagagtacaaacgtggcttcggcgtgccgacgctgatcgcggttcacccggaaaacgatccgaaaggcgaaggcatggcgattgccaaggcgtgggcagcggcgaccggcggccaccgtgcgggcgtgctggaatcgtccttcgttgccgaagtgaaatccgacctgatgggcgagcagaccattctgtgcggcatgctgcaggccggttctctgctgtgcttcgataagctggttgaagagggcaccgacccggcatacgcggaaaaactgattcagttcggctgggaaaccatcaccgaagcgctgaagcagggcggtattacgctgatgatggaccgtctgtccaacccggcaaaactgcgtgcttacgcgctgtctgaacagctgaaaaccatcatggcgccgctgttccagaaacatatggacgacatcatctccggcgagttctcgtccggcatgatggcggactgggcgaacgacgataagaaactgctgacctggcgtgaagagaccggtaaaaccgcgttcgaaaccgcgccacagtatgaaggtaaaatcggcgagcaggagtacttcgataaaggcgtcctgatgattgcgatggtgaaagcaggcgttgagctggcgttcgaaaccatggtggattccggcatcattgaagagtctgcgtactacgaatcactgcacgagctgccgctgatcgcgaacaccatcgcccgtaagcgtctgtacgaaatgaacgtggttatctcggataccgcagaatacggtaactacctgttctcttacgcctgcgtaccgctgctgaaagagtttatgaccactctgcagccgggcgatctgggtaaagcgattgcagaaggtgccgtggacaacgcgcagctgcgcgatgtgaacgaagccattcgcagccaccagatcgagaaagtgggtcacaaactgcgtggctacatgaccgacatgaagcgtatcgcggtagcgggttaacaaccttgtcgggtggtgcttcgcttatccgatctacaaaaccgtaagatgtaggccgggtaaggcgcagtcgccacccggcttgtttatttgcggtacagcactttaatcacgtggtagccgaactgcgtgtgcagcgggccggttggctccagcaccgggcaggagaagaccactttatcgaatgccggtaccatctgaccctggcggaattcacccagatcgccgccgcgtttgcctgacggacagatagagtgcttcttcgccagcttgccgaagtcggcgccgtttttgatctgctccagaagatccagagccagtttctcttctttaacaagaatatgcagtgctgctgctgtttttgccatgatcgtgccttgagtggtatggattaggctcgctatactaccacgctgttattctcccctcctgactttcattgagtgatcatttatgcgtttaaaccccggacaacaacaagccgtcgaatttgtcaccggaccgtgtctggtgctggcgggtgcaggatccggcaaaacgcgcgttatcaccaataaaattgcgcacctgatccgcggctgtggctatcaggcccggcacattgcggcggtgacgtttaccaataaagcggcgcgtgagatgaaagagcgtgtcggccagacgctgggacgaaaagaggcgcgcggcctgatgatctccaccttccacacgctggggctggatatcatcaaacgcgagtatgcggcgctgggaatgaagtccaacttctcgctcttcgatgacaccgaccaggtggcgttgctcaaagagctcaccgaggagttgatcgaagatgacaaggtgctgttgcagcagctgatctcaacgatctcaaactggaaaaacgatctgatgaccccggcccaggccgcggcgatcgccaaaggcgaacgggatcggatcttcgcccactgctacggtctgtacgatgcgcacatgaaagcgtgcaacgtgctggactttgacgacctgattctgctgcccacgctgctgctgcagcggaacgaagaggttcgcgagcgctggcagaacaaaatccgttacctactggtggatgaatatcaggacaccaacaccagccagtacgagctggtgaagctgctggtggggcagcgcgcgcgtttcaccgtggtcggcgacgacgaccagtcaatttactcctggcgcggcgcgcgtccgcaaaacctggtgctgctgagcaaagattttcccgctctgcaggtgattaagctggagcaaaactaccgctcctccgggcgtatcctgaaagcggcaaatatcctgatcgccaataacccgcatgtgtttgagaagcgtctcttctccgagctgggttacggtactgaattgaaggtgctcagcgccaataatgaagagcatgaggcggagcgcgtgacgggcgaattgatcgcccaccacttcgtcaataaaaccgaatataaggattacgcgatcctctatcgcggcaatcaccagtcgcgcgtctttgaaaagatgctgatgcagaaccgcattccgtacaaaatctcgggcggtacgtcgttcttctcacggccagagattaaagatctgctggcctatctgcgcgtcctcacgaacccggatgacgacagcgcgtttctgcgcatcgtgaatacgccgaagcgcgagattggcccggcgacgctgcaaaagctgggcgagtgggcgatgacgcgtaataaaagcctgtttaccgccagcttcgacatggggctgagccagacgttaaccggtcgcggctatgattcgctaacgcgattcacccactggctcggcgaagtgcagcgtctcgcggagcgcgagccggttgcggcggtgcgcgatcttattcacggcatcgactatgagtcctggctgtacgaaacctcggccagcccgaaagccgctgagatgcgcatgaagaacgttaaccagctcttcagctggatgaccgaaatgctggagggctctgaaatcgacgagccgatgaccctgacgcaggtcgtcacccgctttaccctgcgcgacatgatggagcgcggcgagagcgaagaagagaccgatcaggttcagctgatgacgctgcatgcgtccaaagggcttgagttcccgtatgtgtatctggttggtatggaagaggggttgttaccgcaccagagcagcattgacgaagataacgtcgacgaggaacgccgcctggcctacgtggggattactcgcgcgcagaaagaactgacgttcacgctgtgtaaagagcgccgtcagtatggcgaactcgtccgcccggagccgagccgtttcctgctggagctgccgcaggatgacctgatctgggaacaggaacgcaaagtgattaccgcagaagagcggatgcataaggggcaggctaacgtggcgaacattcgcgccatgctggcaaaagccaaagagaaaggataatgatgagcaggccggataaggcgacgccgccacccggcaatgttcagcgtattacttcacttccagcacccagtgcacatagctctgccactggcactcctgctcgatcatctctgccccaagcgggtgacgttcaatccagttttccggcagcgtcagcgacagtttttcgtcatcggccaccagattgattgcaggcagcaaatcatcgcgacggcggctggcaaagagaatcgccagacgcagcaggcggcacagatgttcggccacgcgcggcggtacggcgttttgctgatgcaaagatgagagatcaacggcgttggtctggttcagcagcagcgttgccagcagctttttctgtgcgggcgtgtagcccggtaaatccaggttgcgaaccagatacgctgcgtgagcgggggcctgcttaaaatcaatgctcagccccacttcatgcagcgcacaggcgctcagcagtaaatcgcggctcagatgatcaagatcccagacgttagcgacctgatcggcgaagcgagatgccagctgcgacacgcgtcctgcctgatcgatatcaaccagaaaacgacgctgtacgttgcgcagggttcggctgcggatatcctgatcgaccgacagatgcagcatcccatagaccaggccttcgcgcagcgcgccgccggcaagggtcatacactggatgttgagctcggtgaaaatggcgatcagaatggccagcccgctcgggaagaccagcgcgcgttccagcgtcaggccttcaatttccagttcttccaggcgtccgcactggatggcgcgctgttttagctgctgaagtttggcaagcgtaatccgctcgtccattccctgcgccatcatgatttcctgcagggcctgcacggtccccgacgcacccacgcacactttccagccgtgatagcgcagttcgtccatcacgggacgtaatacctcgcgcgcggcattttctgcctcgtcgaagttctctttacccagattacgatcggtaaaatagcgctcaagccaggtcacgcagcccatcgacaggctgaacagcgacgtagcctgcgcgccggtgccggtcaccagctcggtactggctccgccgatatccaccaccaggcggcgatcgtcaccccccgtggtgtgtgcaacaccctgataaatcagacgagcttcttcttcaccgctgataacctgaaccgggcaaccgagaatctcctgcgctctggcaataaaatccacggcgttaaccgccaggcggagtgtcgcagtggcgacaacggtgatttgggcgtgcgggatatcctgcagacgctcggcaaagagtcgcaggcactgccagccacgttccatggcttcaggcgagaggtgattgtcgctgctcaggcccgccgcgaggcggaccttgcgcttaatgcgcgtcagcgtttgtatgcttcccgccacctcgcgcacaaccagcatatgaaaactattcgaaccgagatcaattgccgcataaagcgaggtggagctgagcatatcttcttaacctgaacgacgacgattacgcggtgcgccgcctgaacgacgcggaccattgccggagcgtgggcgggtaagacgcttaggcggcggcagttcgcttaacagcgcttccggattgtatttgctctgcggaatagagtgaccgatgtaggtctcaatggccggaaggttcagcgcatactcttcacacgcaaggctaatagagtgaccgcttgcgcccgcgcgaccggtacgaccgatacggtgtacgtagtcttcgcagtcgtctggcagatcgtagttaaagacgtgcgttacggctggaatgtgtaaaccacgtgcagccacgtcggtggcgaccagaatatcgagatcgccgcgggtaaactcttcgagaatacgcaggcgttttttctgcgccacgtcgccggtcaacaggccaacacggtgaccatcggcagccaggtggccccagatgtcttcacaacggtgtttggtgttggcaaagatgatggcgcgatctggccactcttcttcaatcagcgtttgcagcaggcgcattttctcttcattagaaggatagaagagctcttctttaatgcggtgacccgttttctgctccggttccacttccacgtattcggcgttgttcatctgttcgaacgccagctcgcgaacgcggtaggagagggttgcagagaacagcatgttcaggcgctggttggccggaggcatacggcggaacagccagcggatgtctttaatgaagcccagatcgtacatgcggtcagcttcatcgagcaccacaacctggatggcaccgaggttaatgtggttctgtttggcgtaatcgataagacggccggtggtaccgatcaggatatccacaccgctttccagcactttcagctgtttatcgtagccgtcgccgccataggccaggcccagcttcaggccggtagcctgcgccaggggttcagcgtctgcgtggatctgtaccgccagttctcgcgtcggggccataattagcgcgcgcggctggttaactttgcggtctgcaatcgctgggtgagaaagtaaataatgaaacgttgacgttaaaaacgccatcgttttgccggtaccggtttgcgcctgcccggcaacatcgcgaccggccagcgtcagcggcagcgcgagggcctgaatgggcgtgcagttatgaaaccctttattttcaagggcttcaatcaccttcgggtgcagcgcgaagtcggaaaacttctgttctgttaaatgtgttttgctcatagtgtggtagaatatcagcttactattgctttacgaaagcgtatccggtgaaataaagtcaacctttagttggttaatgcgacatcaacgcgtcgttggtggagacaaaaccaacgtaccaggcttattcctgtggagttatatatgagcgataaaattattcacctgactgacgacagttttgacacggacgtacttaaggctgacgggctgatcctcgtcgatttctgggctgaatggtgtggtccttgcaaaatgatcgccccgattctggatgagatcgccgacgaatatcagggcaaactgaccgttgccaagctgaacatcgaccagaacccgggcaccgcaccaaaatacggtatccgtggtattccgaccctgctgctgttcaaaaacggcgaagtggcggcgaccaaagtgggcgcgctgtccaaaggtcaactgaaagagttcctcgacgctaacctggcgtaaggtttctccgctgtgcgttcagagcccccggctaaatgattcggaactctggacgcccggctgaagtcgtgctaagttagctatgacttcgttttaaacatatcttgttgtttgaatcttgttttacccgatacttcccgttgttaacatgaacagtgcgtgaagtggctaaattccgggcttgtcactcaatccgtcttgtcgtttcagttctgcgttctttccctgtgaccagacagcgaacagacatgagttgatggccgctaaacaggcatggatgaccctgccataccattcacaacattaagttcgagaatcaccccgagtttaagaacccacaccattatgaatcttaccgaattaaagaatacgccggtttctgagctgatcactctcggcgaaaatatggggctggaaaaccaggctcgtatgcgcaagcaggacatcattttcgccatcctgaagcagcacgctaagagtggcgaagatatctttggcgacggtgtgctggagatattgcaagacggatttggtttcctccgctctgcagacagctcctacctcgccggccctgacgacatctacgtatcccccagccaaatccgccgtttcaacctccgcactggtgacaccatttcaggtaagattcgtcctcctaaagagggtgaacgctactttgcgctgttgaaagtcaatgaagttaacttcgataagccagaaaactcgcgcaataagatcctctttgagaacttaacgccgctgcacgcgaactctcgcctgcgtatggagcgtggtaacggttctaccgaagacttaaccgcgcgcgttctggatctggcctcaccaatcggtcgtggtcagcgtggtctgattgtggcgccgccaaaagcgggtaaaaccatgctgctgcagaacatcgcgcagagcattgcttacaaccaccctgactgtgtgctgatggtgctgctgattgacgaacgtccggaagaagtgaccgagatgcagcgtctggttaaaggtgaagtggttgcttctaccttcgacgagccagcatctcgccacgttcaggttgcggaaatggttatcgagaaggcaaaacgcctggttgagcacaagaaagacgtgatcatcctgctcgactccatcacccgtctggcgcgtgcctacaacaccgtggtcccggcgtctggtaaagtcctgaccggtggtgtggatgctaacgccctgcatcgtccaaaacgtttcttcggtgctgcacgtaacgtcgaagagggcggcagcctgaccatcatcgcgacggcgctgatcgataccggttccaaaatggacgaagtgatttacgaagagtttaaagggacaggcaacatggaactgcacctctctcgtaagatcgctgaaaaacgcgtcttcccggctatcgactacaaccgttccggtacccgtaaagaagagctgctcaccacccaggaagagctgcagaaaatgtggatcctgcgcaaaatcattcatccaatgggtgaaatcgacgcgatggagttcctcattaacaaactggcgatgaccaaaaccaacgacgatttcttcgacatgatgaaacgctcgtaacgcaaataaagccagcgaacgccacgtttttacgtggcgtttttcttttatggactatacgctagtaccacctactcccaattttgacctgtcggtgcgacaataagaccgtttgcacagtcaaagtaataattgtttgaaaaatatacaaagggagttgtaagaagccatctttattacttctgaggtaatggcttcatggttatacttccgggactaacatttgttgagagcaatccattgtgaatctattcaccgccgttactgaactgatcagtatttttttattcacaacctgttttttgttcatcgcacgtaaggtggcaaaacgaatagggttagtggataagccaaattttcgtaaacgccatcagggacttattcctctagtcggcggaatttctgtttacgcagggatttgcttcacgtttgggattgccgattattatatcccgcatgccgccctttatgtcgcctgcgccggtgtcctggtgttagtcggggctcttgatgaccggtttgatatcgcggtgaaaatacgcgctaccgttcaggcggccattggcgtggtgatgatggtagtgggcggactgtatctgagaagcctcgggtatgtgtttggcccctgggagttagtcctggggccatttggcttcttcctgacactctttgctgtctgggcagcaatcaatgctttcaacatggtggatggcattgacggcctgctcggtggattgtcatccgtctcgttcgccgctatcggcattattttatggtttgatggtcagtacagcctggcaatgtggtgttttgccatgattgctgccattctgccttatatcctcttaaacctcggtgtgctgggtcgtcgctataaagtctttatgggagacgcaggcagtacgctgattggttttacggttatctggatcctgcttgaaactacgcagggtcaaacccatccgataagtcctgtaacagcgctgtggattattgccattccattaatggatatggtggcgattatgtatcgccgcctgcgcaaagggatgagtcctttctctcccgaccgccaacacattcatcatctcatcatgcgtgcgggttttacgtcccgtcaggcgtttgtgcttattacactggccgccgctattttggccgcgattggtgtggctgcagaatattctcatattattcctgagtgggttatgttggcattgttcttgctcgcatttttcctgtacggctactgcattaagcgcgcatggaaagtagcgcggttcattaaacgtattaaacgcaggatgcgtcgtaacagtggcaaaaacacaacattaactaagtaaaaccgggactatgatgactcaaccgttggcgggagcgaaatcagtggtaactgagaatgaactggatattcggggtttgtttcgcgtgttatgggcaggcaaactttggattgcggggatcgcgctggggtttgcactgttagcgctggcctatacgttctttgcaaaacaagagtggagcgccacggcaatcactgacaaaccaacggttaacatgcttggggggttctattcccaacagcaattcctgcgaaacctggatatcaaagctaacctcgccacgccggatcaggtctccgttatggatgaggcctataaagagtttgtgatgcaactggcttcgtgggatacgcgccgcgacttctggtcccagacggattactacaagcagcgtcgggttgataacaccaaagccgatgccgctctgctggacgatctgattaacaatatacaatttatgccgggcgacgcgctgcgtaacgtgaatgacagcgtcaagctgattgcagaaaccgcgccggacgccaacaacctgctgcgtcagtatgtcgcgtttgccagccagcgtgccgcaagccatcttaacgaagagcttaaaggcgcctggtcggctcgcaccatccagatgaaagcgcaggtgaaacgtcaggaagaggtggctaaagcgattttcgctcgccgtgtacacaatattgagcaggcgctgaaaattgcggaacagcacaatatttcccgtactgaaacggacgtgccggctgatgaactgcctgattcagagatgttcctccttggccgccccatgttgcaggcacgtctggaaaaccttcaggccgtcggtcctgattttgacctcgattacgatcaaaatcgcgcgatgctcaatacgcttaatgtcggtccatctctggacccgcgttttcagacctatcgttatttgcgaacgcctgaagaacctgtaaaacgcgatagtccgcgtcgtgcattcctgatgatcatgtgggggattgtaggcgcactgacgggcgctggcgtggcgttaacgcgtcgtcgcacaaactaagaatgccgtctacgatgaaggctgcggccttcatcgcctaatcgaagagaatcgatgtgaaagtactaaccgtatttggcaccaggccggaggccattaagatggcacctctggttcatgcgctggccagcgatcctgatattgaagcgaaagtgtgcgtcacggcccagcaccgtgagatgctcgatcaggtgttaacgctcttttccatcgtcccggattacgacctcaatattatgaaaccggggcaaggattgacggagataacctgtcgcattctgcaagagctgaagcctatcctggagtcattcaagcctgacgtggtgctggtacacggcgacactaccacgaccgtggcgaccagcctggccgcgttttaccagcgaattcccgtggggcatgttgaggcgggtctgcgtaccggcaatctctattcgccgtggccggaggaggccaaccgcacgcttaccggccatttggcgatgtaccactttgccccaacggaaaactcgcgtcagaacctgctgcgtgaaaatatcgccgataacaaaatctttgtgaccggcaatacggtcatcgatgcgttgatttgggtacgcgatcgcgtcctcgcaaatgacgagcttaagaaagaactcgctgcccgctatccattcctgcacaacggcaaaaaaaccattctggtcaccggccatcgtcgcgaaagctttggccggggttttgagcaaatctgtcacgcgctggctgaaatcgcggcgcagaacgacgacgtgcagatcgtctatccggtccatctcaatcctaacgtcagcgagccggttaaccgcatcctgggccatatcgaaaatgtccttctgattgaacctcaggactatctgccgtttgtctggctgatgaaccatgcctggctgatccttaccgattccggcggcattcaggaagaagcgccttctcttggcaaaccggtgctggtgatgcgtgaaaccaccgaacgtccggaagcggtcaaagccggtacggtgcgtctggtcggcaccaacgcggaactcatcgtcgaagaggtcacgcgccttctgcatgacgacgaaacgtatcaggcgatgagccgggcccataatccgtatggagacgggcaggcttgtggccgtattttgcatgcacttaaaaacaatcgggtatcgctatgagttttactaccatctctgtcattggtcttggctacattggcttgcctaccgcggcggcgtttgcctctcgtcagaaacaggttgtcggtgtggatatcaacgcccgtgcggtggaaaccattaaccgtggcgagattcatattgtcgagcccgatttggatcgcgtagtgaaagaggcggtggagggcggcttcctgcgcgccagtaccacgccggttgaagcggatgcctacctgattgccgttccaacgccctttaaaggcgaccacgagcccgacatgggctacgtcgaggcggcggcaaagtccattgcccctgtgctgaagaaaggggcgctggtgattctggaatcaacctctccggtcggtgctaccgagcagatggcgcagtggctggccgacgcgcgccctgatttaagcttcccgcaacaggcgggggagcaggcggatatcaacatcgcctactgtccggagcgcgtcctcccgggccaggtcatggtcgaactgataaaaaacgaccgcgtcattggcggtatgacgcccgtctgttccgagcgcgccagcgcgctgtacaagattttcctggaaggcgagtgtgtggtgacaaactcccgcaccgccgagatgtgcaagctgacggaaaacagcttccgtgacgttaatatcgcctttgcgaacgaactgtcgctgatttgcgccgatcaggggattaacgtctgggagttgattagcctggcgaatcgccatccgcgtgtaaacattctccagccaggcccgggcgtgggtggacactgcatcgccgtcgatccgtggtttattgtggctcagaatccggcgcaggcgcgcctgattcgcaccgcgcgtgaagtgaacgacagcaaacctcactgggtgctcaatcaggtcaaaaccacggtagcggattgtctggcagagagcggaaagcgcgccagcgagctgaaaattgcctgctttggtctggcattcaaacccaacattgacgacctgcgcgaaagcccggcaatggaaattgctcagatgattgccgaatggcacaagggtgaaacgctggtggttgagccgaatatcgatgagttgccggcaaaactggcggggcactgcacgctggctgcgctggatgaggcgctggcgacggcggacgtgctggtgctgctggtggatcataaagcgtttaaagcgacgtccggtgatgcggtgcgtcagaagtatgtggttgataccaaaggtgtctggcgttgaacagcctgaacggggtacttgagcccctgcagtgggagagtgcctttttcggcctgccgtcggccattgtgcgtctgcgcgatgatgcgccggtactggctgaatcggatttcatcgcctggcaacggattcaggcgaagatcccggcggaccgtaccgacctgcttgatgcgctccagcaacgcggctttcagctggtggaaggtgaggcagacctttccataaccctcacccggcatgatgcgcccggtgcggaaatggcaaccgaacaggatattcccgtgctgcgtcagatggcggctcaggcgtttgcgcagagtcgctttcgtacgccctggtacgcacctgacgatagtggacgtttctatgcccagtggatagagaatgcggttaaaggcacctttgaccacgtctgcctggttttccgcgcaggggacggtcaactccaggggttcgtctcgcttcgcaagctcaacgtgcgcgaggcgcgtattggcttattagccgggcgcggcatgggtgagaaacttatgcaggcggcgctgcactgggcgcagcagcagcaggttgagacgctgcgggtggcgacccaggtgggcaacaccgccgcgcttaaacgttatattgcgagtggtgccaacatcgacgccaccgcctactggttatacaggtgacaagatgattccatttaacgcaccacccgtcgtcggaacggaactcgactatatgcagtctgccatgggcagcggcaaactctgcggtgacggcggtttcacccgtcgctgtcagcagtggatggaacagcgttttcgcagcgccaaagtactgctgaccccgtcctgtacggcatcgctggaaatggccgcactgctgctggatatccagcccggcgatgaagtgatcatgccgagctacaccttcgtttccacggcgaatgcgtttgtcctgcgcggggcgaaaatcgtctttgtggatatccgcccggataccatgaacattgatgagacgctgattgaagcggcgatcaccgacaaaacgcgcgcgatcgtgccggttcactacgcaggtgtggcctgtgaaatggacaccatcatggccatcgccaaaaaacataacctgtttgtggtggaagatgccgcgcagggcgtgatgtcgacctacaagggacgcgcactgggcaccatcggccacatcggctgctttagcttccacgaaaccaaaaactacacggcaggtggagagggtggcgcgacgctgattaacgaccgggcgctcgtggagcgtgcggaagtgatccgcgaaaaaggcaccaaccgcagccagttcttccgcggccaggtagacaaatacacctggcgcgatattggctccagctatctgatggcggatctgcaggccgcgtacctgtgggcgcagctggaagccgcggatcgcatcaacctgcagcgtctctccctgtggcaaacctattacgatgcgctggaacctctggcaaaagccgggcgtattgcgctgccaacgattccggcggattgcgtccacaacgcgcacatgttctacatcaagctgcgcgataacgacgaccgcagcgagctcatcgcctggctgaaagaagccgaaattatggcggtgttccactatatcccgctgcactccagtccggcgggcgaagcgtttggaacgttcgcaggtgaagaccgttacaccaccaaagaaagtgagcggttgcttcgtctgccactgttctacaacctcgcgccagttaaccagcgtacggtgattaataccctcctgagttatttcagctgatatgtctctggcaaaagcatcggtgtggaccgccgcgtccacgcttgtaaaaattggggccgggctgttggtcgtcaagctcctggccgtctcatttggcccgtcaggagtggggctggcgggtaatttccgtcagcttgtcaccgtccttggcgtgctggccggtgccggtatcttcaacggcgtcaccaaatacgttgcgcagtatcatgatgatgcggcccagctccgcagggtggtgggcacctcctcggcgatggtcacgggtttttcgaccctgatggcgatcatctttctgctggcggcggcgcccatcagccagggattattcggccacacccactatcaggggctggtgcgtctggtcgcattggttcagatggggattgcctgggctaacctgctgctggcgctgatgaaagggtttcgtgatgctgccggaaacgcgattgccttaatcctgggcagcgttatcggcgtgattgcctattatttctgctatcgcctgggtggctatgaaggcgcactgctggggctggcgctggttccggcgctggtggttgtgcctgcggcatttatgctgatgcgtcggggcgtcattccgctgagctacctgaaaccgcaatgggactcgatgcttgccagccaactgggtaaatttaccctgatggcgctcatcacctccgtcacgctgccggtggcctacgtgatgatgcgaaacctgctggcggcgcactatagctgggatgaggtcgggatctggcagggcgtaagcagtatttccgatgcctatcttcagtttattacggcttcctttagcgtttacctgctgccaaccctgtcgcgtctgacgtccagacaggacataacgcgcgagattttccgatcgctgcgctttgtattgccggccgtcgcggctgccagctttaccgtctggttattgcgcgatgtcgccatctggctgctgttctcggcgaagttcaccgccatgcgcgatctctttgcctggcagctggtgggtgatgtactgaaagtgggggcttacgttttcggctatctggtgatcgcgaaagcgtcccttcggctctatatcctggcggaaattagccagtttgttttactgacggcattttcacactggctgatacccacgcacggtgcgctgggggcggcccaggcctacatggcaacctatatcgtttatttcgccgcctgttgcggtgtatttttattgtggcgtaaacgcgcatgactgcactgattcacatcctgggatcggatatcccacaccataaccagaccgttttgcggttcttcaacgacgagctggcatcgggagatcctgatgcgcgtgagtttatggttgcaggtcaggataagggcctgagcgaggcgtttccggcactgacgattcgcttctggccggataaggcctcactggcgaaggcggtggttgccaaagccaaagcggatcgtaagcaacgtttctttttccacgggcagttcaataccggcctgtggctggcgcttctcagcggagggattaaaccctcccagtgcagctggcatatctggggagccgatctttatgaagtctcccgcggctggaaattccgtcttttttatcccctgcgccgcatggctcaggagcgcgtaggctgcgtttttgctacccgcggcgatctcaactattttgctaaacagcacccgaacgtgcgcggcgagttgctctatttccccacccgcatggatccggcgctgaacgccatggcgaatgacgcggtgcgtgaaggcaagctgacgattctggtggggaattccggcgatcgcagtaacgaacatgtcgcggcgctcagggcggtgcatcagcagtttggcgacacggtgaacgtggtggtgccgatgggctatcccgccaacaacagcgcctatatcgacgaggttcgtcagcaggggctggcgctgtttagcgctgaaaatctgcacatcctcagcgataagctggaatttgatgaatatcttgcgctgctgagaaaatgcgatctcggttatttcatctttgcccggcagcaggggattggcacgctgtgcctgctgattcaggcaggtgtaccgtgcgtgctcaaccgcgacaacccgttctggcaggacatggccgagcagcatattccggtgctgtttacctcagacacgctgaatgtcgaggtggtacgtgaagctcaacgtcagctcacgctggtggataaaaacagcatcgattttttcagcccgaattatctcacgccgtggcaccgcgcgctacgtatcgctgcaggagacaaagcatgagtcagttgcaattcagcggcttactggttgtctggcttctgagcagcctgtttatcgccacgctcacctggtttgaattccgccgcgtgcgcttcaactttaacgtcttcttctcgttactgtttctgctgacgttctttttcggcttcccgttgaccagcatactggtcttccgttttgacgtgagcgtcgcaccgccggacattctgctccaggcgcttctggcggcgacctgcttctatgcggtttactacgtcacctataaaacgcgtctgcgttcagcgcagacagctgccccacgccgggcgctctttaccatgaatcgggtggaaacccacctgacatgggtgatgctgatgactatcgccctggtcagcgttggcatcttcttcatgcataacggcttcctgctttttaaactccactcctacagccagattttttcggcagaagtctcgggcgtggcgcttaagcgtttcttctacttcttcatcccggcgatgctggtgatcttcttcctgcgccaggacagcaaagcgtggctgttcttcctggtcagtaccgtcgcatttggcatcctgacctacatgattgtgggcggtacgcgcgcgaacatcatcatcgccttcgcgatcttcctgtttatcggcattatccgcggctggatctcgctctggatgctggttgcagcaggcgtgtttggcattgtggggatgttctggctggcgctgaagcgctacgggatgaacgtggcgggtgatgaggcgttttatacgttcctttacctcacgcgcgatacgttctcgccatgggaaaacctggcactgctgctgcaaaattacgacaagattgatttccaggggctggcgccgattgttcgcgacttctacgtctttatcccttcctggctatggccggaccgtcctggcgtggtgctgaatacggcgaattacttcacctgggaagtgctgaacaaccattccggtctggcaatttcacccacgctgctcggttccctggtggtgatgggcggggcatggttcattctccccggagcggttgccgtggggctgattatcaagtggttcgactggctttacctgcgtggcaatgaagagaccaatcgctataaagcggccattttgcacagtttctgctttggtgccattttcaatatgatcgttctggcgcgcgaaggtctggactcgttcgtttcgcgcgtggtgttcttcatggtcgttttcggcatctgcctgttactggccaagctgttgtactggctgtttgacagcgccgggcttgtgcacaggcgcgagcggcagggcagcacaacgctgtcgcaagtctgagtaaggatagtaatgactgatagaatttctgcaccgcgctatgcgctacgtggtctgcagctgattggctggcgcgacatgcagcacgcgctggattttctgttcgccgacggccagatgaaatccggtacgctggtggccatcaacgcggaaaagatgctggcggttgaggataacgcggaagtcaaaagcctgatagacgcggccgaatttaaatacgcagacgggatcagcgtggttcgctctatccgtaaaaagtatcctgacgctaatgtttcccgcgtggcgggtgccgatctctgggagcagcttatggcccgtgcaggcgcgcagggaacgcccgtgttcctgattggcgggaagccggagatactggcccagacggaagagaaactgcgtcgtcaatggaatgttaatattgtcggcagccaggatggttacttcaaaccggaagatcggcaggcgctttttgcgcgcgttcgtgacagcggggcgaagattgtcaccgtggcgatggggtccccgcgccaggagatcctgatgcgtgactgtcgtctggtctgcccggatgccctctacatgggcgttggcggcacatatgacgtctttaccggccacgtcaagcgtgcgccagcggtctggcaacatctggggctggagtggctgtaccgcctgctatcgcagccgacacgcattaaacgacagatccgtctgcttcgctacctcgcctggcattacaccgggaaaatgtaatcaaaatgtagcgcgatatgctattcgcgctgcaactcgcctgcaaaactgctgataatctgtgcaatgcattcattttttttatgcatcgtttgccatttggcacattttaagaaaccattcgctccgtattttagtccccctaaaaaacaatacccggtcttaagtcgggaaacagcaaacacaatcgaggatctatggcagagaaaaaacaggagctacagcgtgggctggaagctcgtcatattgaactgatagcgctgggcggcactatcggcgtgggcctgtttatgggctccgcaagcacgctcaagtgggcaggcccttccgtattactggcgtacattattgccgggctgtttgttttcttcatcatgcgttccatgggcgaaatgcttttcctggagccagtaaccggctccttcgccgtttacgcgcaccggtatatgagcccctttttcggctacctgacagcctggtcatactggttcatgtggatggcggtgggcatctccgagatcaccgcgataggggtctacgtccagttctggttcccggacatggcccagtggatacccgcgcttattgccgtggggctggtggcgctggcaaacctggccgccgtgcgtctttatggtgagatcgagttctggttcgcgatgattaaagtcaccaccatcatcgtgatgattgttgtcggcctgggcgtgattttcttcggctttggcaacggtggacacgctatcggtttcggtaacctgaccgaaaacggcggcttctttgccggcggctggaagggtttcctgacggcgctgtgtatcgttgtggcttcgtatcagggcgtggagctgatcggtattactgccggtgaagcgaaaaatccgcaggtcacgctgcgtagcgcggtgggcaaagtgctgtggcgcatcctgattttctatgtgggcgcgatcttcgttatcgtaaccatcttcccgtggaacgaaattggcacgacgggtagcccgtttgttttaacctttgccaaaattggcatcacggcggcggcgggcatcattaactttgtggtcctgacggccgcgctgtcagggtgtaacagcgggatgtacagctgtgggcgtatgctctatgcgctctcgaagaataaccagctgcctgcggcgatgagcaaagtgtcacgtgctggcgtgccggtggcgggcgtggcggtttcgattgcgatcctgctgattggctcttgcctgaattacatcattcccaatccgcagcgggtgttcgtttacgtctacagcgccagcgtcctgccgggcatggtgccgtggtttgttatcctcatcagccagctgcgtttccgtcatgcgcataaaaaggcgattgaaagccatccgttccgttcaattctgttcccgtatgcgaactatttaacgatggcgttcctgatttgcgtattaatcggaatgtactttaatgaagatacccgcatgtcgctgtttgtcgggatgatcttcctggccgctgtaacggctgcctataagctttttggtctcagtcgccgtgccaccacgcagaaagtggaggaataagcggcaaaatgtgcaaacgataaccaaacgcgcatttttttcaaaaaagcactagacagcggggacggaggtacgtaatatccagccccgcaacggcgctaagcgcccgtagctcagctggatagagcgctgccctccggaggcagaggtctcaggttcgaatcctgtcgggcgcgccattttagtcccggcgctagagctgcggtggtctgagaagtagtcagtaccgcgtgaaagaatacagtggtggctatagctcagttggtagagccctggattgtgattccagttgtcgtgggttcgaatcccattagccaccccattattgaaagagttgtgaattgcgaaggtggcggaattggtagacgcgctagcttcaggtgttagtgtccttaggatgtgggggttcgagtcccccccctcgcaccacgactttttaaatgaattgaactaaaaattcaaaaagcagtacatcggcgagtagcgcagcttggtagcgcaactggtttgggaccagtgggtcggaggttcgaatcctctctcgccgaccaattttgaaccccgcttcggcggggttttttgttttgtgccacttttcaccgctgtagtgattccccgacagcgtcctgtttcattgtcgcgattcagcgacatataattcattgaaaataaacatatttactatccataggttttgctgtctcctcctggcgacatatttctgcgttgaccgatatgttgtagcgattaagacgacgcttaacagcataatttccttttatcttaaaatgttgcgtcatgtaaaagttctgcgtgtcatgttggcacgttacgtgcaataatatgcgtgtagatgctcattccatctcttatgttcgccttcgtgcctcataaactccggaatgacgcagagccatttacggtgcttatcgtccactgacagatgtcgcttcggcctcatcagacaccatggacataacgttgagtgaagcaccaaatatgttgtcttacagacctgttttaacgcctgcttttatagcaggcgtttttttatgccttattcccgataccggcgcacgatcagggcaaccatcaccagggccgctgacgagacagcatagagtgcggctactgagccaaacccggcagccactgccgctgcgatgccggtgaagagagaggcgctgagcgtttgccagcgccaggctttaccactggccgaagcggtttgcgtaatatgaaaactactgagaacgccaaacgtcccggccgcgaacagaacattcgaagccagatgcgcgataaagatcatccccagcgcacatgccatccacccggacaacaacggcagcattccataagcggccagaaagatgccgagacaaacgatgatgcgtggcgtgcgagcggcaaagcgcgtcaggctctctttttttagcaacatggggccgcaaagctgtcccaggctccttgcgaaaagcagcggcaaagcaaggcccgccgcatcctgaggatggagttgctgtgccagtgccggaagtagtgccatggccggcgagccgacggccgccagcgctggcaggatgagcagactgcgtttctgccgaacggtcaacgtccgccagcgtaatgccgcaggggcttcctcttcctcgagggacggtagtgatggcgctgaaaaccggcgtccagccagccatagcatgagcagtgacccgagaaagctggcggcatcaatggccagaagggtaaatacggatatcttctgaaacagcatcacgcccaggccggtccccagcaaaacctgagaagcaaaaatcacattttccagacaggtcgcagcaggcagctccgcttcgctgagaccgcgcttgaagagcaacgtcagcgcgggccagctcatcccgctgagcagcgcttcggtggattgcacggcgagtaacgcggtaacgctgtgataacccacaccaaggaggggaaagagcagggcgagcaatcccagcgcctcggtcagtatcagcagggcgatcggagaacatcgggagcacagcttttcgccgatcgtactcccgataaaccccggcaccgtagcgaaaagaaaagcgagggtgagcagtgcgggcggggctgaccatgctaacagcaagccgaagaccacgacctgggttaagccattccccagcgaagaaaagataaaagcacaagcaaggaggcgcagccagcggtggcagcgcagcgcttcaatcagcgcatagagaagcgagttcatgacgatttcctttcaaaaacgatttaatccacgctgcagaatgtgcgcgtgtgtgagaaaaagttaatgaaaagagatcgttacattggcgttttcgttagcggatataggtgtaaagaatgtagcagcagaaaggcgataaaaaaaggaggccgtctggcctcctttttgattattgctgggtaccgttgttttgcagggtcagcaacagcccgtcacggcgcatggcggcggcctcttccggcttatgctgcttgtccagcgtatcggcaagccaggcgtagtcgaaggcgtccggacgctgcttcagcgctgcacggaaggcgaggctcgcctcctgccattcgccgtgcttcatcaacgactggccgagcgtgctccacagcagcggtcgatcgccgacggttttaatctgctgacgcagcactttttcgatttgctcaggattgttggttttcaggcgcgggatcaccatcaccagacgatcgtcgtactggcgcttcagaccgtcgaggaggatcgcctgagccgtgtcgtgatcgtcacactcgatgagatgttccgccatcgccacctgcagaggaacctgctgacgcgttttacggctctgattcttccaccacgttttcagaccgtcgctgcccaggtctgcgcgcgcctgatccatcaggccaatccacgccagacgctgaagctcatcacgatgttcatcgtcgcccacctcggccttcgccatcgacggaatgatgtccagcagtgagccccaggcgccggtacgaatataggcctgctcggcaagacgcagcacttccggatgacgcggcgcgacttccagcagacggtcgatgccgtggcgagccgcgtgattctcattgcgtgccagctgcagacgaacgcgcgtgatttccaccggaatcgggtcgccgtgagccagctcagccgctcgctccaggtgctgattagcgcgggcttcgtcaccgcgctgctgcgccgcttcggccgccagcagatagttcaccaccggctgttcggcatggtcggcgtttttcgacatcagcttttcaacctgctgatagtcaccctctgcgagcttaagcagcgcctgctcggtctgtttacgggcgcgacggcgcttacggccaacgaaccagccgcgggtatgggcaccggtacggaaaatacggcgcaggatccactcgatcgcaaacagcaccaccacgccaaggattagaatgatcgtcagacccgttacgctggtttcaatgttgtagttatcggtctggatcaggacataaccctgatgacccgcaagcataggtcccaggacgatcccggcgatcagcaggataaagagtaagaggacttttagcatcgttactctccctgcggtgcgctttcaggcgcaggagccggagcaggtgccgctccgctcgtctgctcagccggaacgcccggctgcgccagcaggttacgcacgcgcgtctgcatcagtttctccagaatcggctggctggtcagcttgtccggcacgttcatggtgatgttctgctgactcagcttatcaatgtcttcgaggaaggcggtggtcgtcgcatcatcggtgttgtagtaagcgcgtacccacgttgagacgttatccagcgcctgtttataggtctcttcctgatgacgcggcacggcctgggccgccaccagcaggcgggaacgaatgttctcgcgcagatagatgtcctggttcggcgcgagcagcggtacggccgtttcgtcgcgacggcggatagtgataaagctgtccataaagttctgccagcttttctgcaggtttatgcgccattcgctcagcgagctggaaagctccgtaccgtcggaatccatcggggagtcgtcgtcgttgttatccgccagctgcaggttatcaatctgattcgacagctgattcactttaaggataatgccgtcgtaatccacctgcgaaacggcggagaggctggcgatgtcttcggtaatcgcgcgacgggcggtaatgaggcttgggtcgttcatgtccgccaggcttgcatcggcgcttttcagcagcgcggcggcagtggtgacgtcctgatcgctccagagcttacgtccggcgagcttcaccaggaagtcagcctgcgagagcagccaggttttggcatcggtgccggaaatcgtggcgactttctgctgaacttcacccagctgtttggtcagctcttcctgtttgctgttcgcttcggcaagcgcggcggcctgctgcttaatcacggcttccagctcggttttctgcgtctcctgctctttttgcagggcagtgagctgattcaccagcgcatcgctggtggacgtctggttagcgctctgttgcttcaccagcccgtagaggccagcccccgctgccagcgcaatggcgatggcaatcgcgctcagcgtgaggcttgttttgttgctgccgtttttcttctcagcggttttctcagtcgtctctggctgtggcgtcgtctccacagtctccctggtctcttcaaccacggcggaggatttgtcgtgttccgtcattatggcttcccatttgagagttattgtaatgcgcgcagcagcgcatcgttgtcggcgttatcagcgatccgaatatcctgccagcccagttcccgggcctggttcgccagacgctcactgacgaccagaagccgacagcggagtaaccagttttcgcgataccaaagcggtatcagcgtccaaagctgttgtaacatttcaccgctggtgaccaccagtgtattgatgcctcgcgcgtgccagcgcatcgcctcttccgcgccatcgtagtgttttgcacagcgctgatagcactcaacgaacgtcacgttcgcaccacgttcacgcagcgtttcgcccagcagctcgcgccccccattgccgcgcaaaatgagcgcacgctttccggcaacagtttgtaattcaggtaattgtagcaagacttcagtgatttcccgatctaacgggtaacgaacgtccgcgccgcttacggtatgcagcgccagtgccgttgtgcggccaatcgcgaaatagccgggggcggttggccaggccatgtcctgctgctgcagctgtgcgtgggcaaattccacggcatgctgcgacagcgcaaacagcaggtcatcgtcctgaagggtattcatctggtcggcgagcgcagagagctcgcgaccgggggagaattcaatgagcggaaaactccaggccacctgccccagtgtgcgcagacggctcactaactgctctcctgcgggagaagggcgggtgacgagaatactcatgcagggggctctccattatatacgtcagccaggatctcgcgggcgccgttatccagtaactcttccgccagcgacacgccaagctgctcggcatcttgcgcgttaccgcgacgttcgccgcgcaccatctgcgaaccgtccggggcgcctaccagcgcgcgcagccacagttcgccattcgtcaattcagcatagctgccaattggcacctggcacccgccttcgaggcgggtattcatcgcccgctccgcttttacgcgcgtagcggtttcgtcatgattcagtggggcaagcagctcgcgggtacgcgcatcgtccagacggcactcgatgccgacggcaccctggccaacagcgggcagtgagagctctggcggcagcgctacgcgaatacgttcttccagccccagacgcttcaggccggcaacggcgaggataatggcatcgtaatcgccgttatccagcttgcccagacgcgtaccgacgttaccgcgcagcgagcggatgatcaggtcaggacgacgctccgccagctgacactgacggcgtaaactggacgtgccaaccacgctacccgctggcagcgcgtcgagcgagtcatagcggttagagacaaacgcatcgcgcgggtcttcgcgctcgcagatggtcaccagccccagcccttccgggaactcgacgggcacatctttcatcgaatgtacggcgatatcggcgcggttctcaagcaatgccagttccagttctttgacaaacaggcccttgccgcccactttcgccagcggcgtatcgaggatcacgtcaccgcgcgtgaccatcggcaccagctcgacgcgcaatccactgtggcaggcttccaggcgctgcttcacataatgtgcctgccagagcgcgagagggctttggcgtgtggcaattctcaaaacattgtctaacatgcttgttaccgtcattatcaatcgctaaccatcctaacattgttgactctgggatggcagttttacggttgatgaagagtgagagggacaaggcggcgtattcgtcagccagagccgtattcaggaatttacacgtacagaacggtgctacacttgtatgtagcgcatctttctttacggtcaatcggcaaggtgttaaattgatcacgttttagaccattttttcgtcggtaccaccaaaaatgataagggcgaaaaagggtaacggttatctttttgaaatactgcgggtccgctgttactcgtgttttgaatagctgcgacacccggaaacatcaggcgatacgtcttgtacctctatattgagactctgaaacagagactggatgccataaatcaactgcgtgtggatcgcgcgcttgctgctatgggccctgctttccagcaggtatacagtctgctgccgacattattgcactatcaccacccgctgatgcctggctaccttgatggtaacgttccccagggcatttgtcttttcacgcctgatgaaacccaacagcattatttgaacgagctggaactctaccggggcatgccgccacaggagtccccgaaaggtgaactgccgattaccggcgtttactctatggggagcacctcatcggtagggcaaagctgttcttctgacctggacatctgggtctgtcatcagtcctggctcgataacgaagagcgtcagctgctgcagcgtaaatgcagcctgctggagagctgggcggcctcgctcggcgtggaagtgagcttcttcctgattgatgaaaaccgtttccgccataacgaaagcggcagtctgggtggtgaggactgcggctcgacccagcacatcttattgctggatgaattctaccgtactgccgttcgcctggccgggaaacgtattctgtggaatatggtcccgtgcgaagaagaagagcattacgacgattacgtcatgtcgctttatgcgcagggcgtactgacgccaaacgaatggctggacctcggcggtctcagctcactgtctgcggaagagtatttcggcgcaagcctctggcagctctataagagtatcgactcaccgtacaaagcggtgctgaaaacgctgctgcttgaagcctactcctgggaatacccgacgccgcgcctgctggcgaaagacatcaagcagcgcctgcacgacggggagatcgtctccttcgggctcgacgcctactgcatgatgctggagcgcgtaaccgaatacctgaaagccattgatgacaccacgcgtctggacctggtacgtcgatgtttctatctcaaagtctgtgagaagttgagccgcgaacgcgcctgcgtgggctggcgtcgtgaagtggtcagccagttagtgaaagagtggggatgggacgacgcgcgtctgtccatgctcgacaaccgggccaactggaaaatcgatcaggtgcgtgaagcgcacaacgaactgctcgatgcgatgatgcaaagctaccgtaatctgatccgctttgcgcgccgcaacaacctcagcgtttccgccagtccgcaggatatcggggtattgacccgtaagctgtacgccgcgtttgaagcgctgccgggtaaagtcacgctggttaacccgcagatttcgcctgacctgtcagaaccgaatctgacctttatctacgtgccgccgggccgcgcgaaccgcaccgggtggtatctgtacaaccgtgcgccaagcatggattccatcatcagccatcagccgctggaatataaccgctatctgaacaagctggtggcctgggcctggtttaacggcctgctgacctcgcgcacgcgcctgtttatcaaaggcaacgaggtggtcgatctcgctaagctgcaggagatggtcgcggatgtgtcgcaccacttcccgctgcgtctgcctgcgccgacgccaaaagcgctctacagcccgtgcgagattcgccatctggcgatcatcgtcaacctggaatacgacccgacggcggccttccgcaatcaggtggtccattttgacttccgcaagctggacgtctttagctttggcgagcagcaaaactgcctggtgggcagcgtggacctgctgtaccgcaactcgtggaacgaagtgcgtaccctgcacttcaacggcgagcaggcgatgatcgaagcgctgaaaaccattcttggcaagatgcaccaggatgccgcgccgccggacagcgtggaagtgttctgctacagccagcacctgcgcgggttgattcgtacccgcgtgcagcagctggtctccgagtgtatcgagctgcgtctctccagtacccgtcaggaaaccgggcgctttaaagcgctgcgcgtctccggccagacctggggcctgttctttgaacgtctcaacgtgtcggtacagaagctggaaaacgccattgaattctacggcgcgatttcgcataacaagctgcatggcctgtcggtgcaggtggaaaccaaccacgttaagctcccgcaggtggtggacggctttgccagtgaagggattattcagttcttctttgaagagtcgggcgacgatgccgggttcaacatctacattctggatgagaccaaccgcgccgaggtgtatcaccattgtgaaggcagtaaagaggagctggtgcgcgacgtcagccgcttctactcctcttcgcatgaccgctttacctacggctcaagctttatcaactttaacctgccgcagttctaccagattgtgaacgtcgatggccgtgcgcaggtgatcccgttccgcactcaggccgtcacgcctgccgcgcctgccaatcaggacaccgcgccgctgttgcagcagtatttctcctgagccttttcgccgggtggctaatgcttacccggcctacggttcgagccgttgtaggcccggtaaggcgcagccgccaccgggcaacaaaactacctgaaacgcacttcctcacccgcctgcgcggtcgcggcctgttccagcagatcccagaacggtacgccgctacggtcgcacacccactcatcacccttcagatcgaagtgatagccgccctgtttggccgccagccacacctggtgaagcggctcctggcggttaataataattttgctgccattttcgaagctcagggtcagaataccgccgttgatttcacaatcgatatcgctgtcgccgtcccagtcgtcaagacgctcttcgatggtcatccacaggttgtcggcaaggcgatggaattcactgtcgttcatggttttgttcctgtttttcgtgatgccggcagtataaccctaaataattcccgttgcaggaaagcggcaaactcttgcttttgtgtcttctcctgcgatgatagaaacagatttgaacttacgggcaactttataatgaaaaacgctttccgaacgcttgccgttctcatcacgctgtttagcctgactggctgcggactgaagggaccactgtactttccgcctgcggataaaaccgcaccgccgccgacgaaaccggttaacagcggcattgagtcttccacgccagatactaacgaccgtggcgacaacggcggcccgactcaggttaatctctgacgacaacgttctgtacccgcgcaatggagcaaatgatgcagttctctaaaatgcatggccttggcaacgattttatggtcgtcgacgcggtaacgcagaatgtgtttttctccccggaactgatccgtcgtctggcggatcggcatctgggcgtggggttcgatcagctgctggtggttgagccgccgtacgatcccgacctcgatttccactaccgtatttttaacgcggacggcagcgaagtgaaccagtgcggcaacggcgcgcgctgtttcgcccgttttgtccgcctgaaagggctgactaacaagcgtgatattcgcgtcagtacagccaatggtcgcatggtgctcagcgtcaccgatgatgagctggtgcgcgtgaacatgggcgagcctaacttcgagccttccgtcgtgccgtttcgcgcaaacaaagcggaaaagacctatattatgcgggcggccgagcagacagtattgtgcggcgtcgtctctatgggtaacccacactgcgtgattcaggttgatgatgtggaaactgccgcggtcgaaacgctcggcccggtgctggaaagccacgaacgtttcccggagcgcgcgaacatcggttttatgcaggtggtgaagcgcgagcacattcgtctgcgggtttacgagcgcggtgcgggcgagacgcaggcctgcggaagcggagcctgtgcggcagtggccgtgggtatctcccaggggttactggctgaagaggttcgcgtggaattaccgggcggtcggcttgatatcgcctggaaaggaccgggtcatccactgtatatgacgggcccggcggcacatgtctatgacgggtttatccatctatgaaacaaccaggggaagaactgcaggaaacagtgacggaactggacgacagagctgttgttgattatctgctgcgcaatcctgagttttttattcgcaatgcacgcgtcgtcgaagagatgcgcgtgccgcatccggttcgcggaaccgtgtcgctggtggaatggcacatggcgcgcgcgcgcaaccacatcagccagcttgaagagaacatgacgctgttgatggagcaggccagcaccaatgaaagcctgttctatcgtctgctgcatctgcaggcgcgtctggcgtcggcgcacagtcttgacgagttcctcagccgcttccaccgctgggcccgcgagctggggctggcgggcgcaacgattcgtctttttcctgaccgctggcgcatcggcgcaccgtcgggatttacccatctggcactgagccgtcaggcgtttgaaccgctgcgcattcagcgtctgggccatgagcaccactatctggggccgcttaacggacctgagctgctggtggtgttaccggaggccaaagcgattggctcggtggcgatgtcgctgatggggcgcgatggcgatctgggcgtcatcttatttaccagccgcgacgcgcatcactatgagcaggggcaagccacgcacctgctgcaggagatcgccctgatgctgcccgagctgctggagcgctggattgagcgcgtatgacggacggactgctcgccactgacgtctcgcgctttctgcgctatctcggcgtggaacgtcagcttagccccattacgctgcttaactatcagcgtcagcttgatgccatcatgcagatcgccgacgagatcggcctgaaaagctggcaacaatgtgacgctgcgacggtacgcgggtttgttgtgcgtagccgtaaaaaaaatctcagcccggcaagcctggcgctcaggctctctgcgctgcgcagtttcttcgactggctggtcagccagggcggcataaaagccaacccggcaaaagggatcgccacgccgaaagcgccgcgccatctgcctaaaaatattgacgttgacgacgtaaaccgcctgctggatatcgatctgaacgatccgctggccgtccgcgatcgcgcgatgctggaggtgatgtacggtgccgggctgcgtctgtctgaactcgtcaacctcgacctgaagcatctcgatctggaatcgggcgaagtgtgggtaatggggaagggcagcaaagagcgccgcctgccgattggccgcaatgctgtctcctggattgagcactggcttgacctgcgcgggctgtttggcaccgacgaagatgcgctgttcctgtcgaaactcggcaagcggatctcggcgcgtaacgtgcagaagcgctttgcggagtggggcattaagcaggggctgaacagccacgtacatccgcacaagctgcgccactcctttgcaacacacatgcttgagtcgagcggcgatctgcgcggcgtgcaggaactgcttggccacgcgaacctgtcgacgactcaaatttatacccacttagacttccaacaccttgcctcggtgtatgacgcggcgcatccacgcgccaaacgggggaaataatgcgtttttaccgcccactcggtcagatctcagccctgacgttcgaccttgatgacactctttatgacaaccgcgaggtgatcctgcgtaccgagcaggagtcgctggcgtttgtgcagaactaccatcccgcgctgaagacgatgcagaacaaggacttccagaagctgcgtcagtccctgcgggagaccgagccggacatttaccacgacgtgaccgaatggcgtcgtcgcgcggttgagcaggcgatgctgaatgtaggcctgagtgcgcaggatgccgcgattggggcggaagcggccatggaaaacttcgccaaatggcgcagccgtatcgacgtgccgcaggaaacccacgacacgctggcgacgcttgccgaaaagtggccgctggtggccatcaccaacggcaatgcccagccggagctgttcggcctcagcgattactttgaattcgtgctgcgtgcgggtcctcacgggcgcgcgaagccgttcagcgacatgtaccatctggcggcggataagcttaacctgccgctgggtgagatcctgcacgtgggggatgacctgaccacagacgtggcgggcgccatccgctgcggcatgcaggcctgctggatcaagccggaaaatgctgacctgatgatcgcctccgatagccgtcttctgccgcacgtggaaatttcgcggttggcatccctcacgacgctgatataatcaccagtaatattgtataaattaacagggttttgctgttgtaggcccggtaagcgaagcgccaccgggcgttttgctctgttcctgaatactatgtgacggtgccaatggacgtttcttacctgctcgacagccttaatgacaaacagcgtgatgcggttgccgcctcgcgcaccaacctgctggtgctggctggagcgggcagtggtaagacgcgcgtgctggttcaccgtatcgcctggctgcagagcgtggaaaactgctcgccgtactccatcatggcggtcacgttcaccaacaaggcggcggcggagatgcgccaccgcatcgcccagctgatgggcaccagccagggcgggatgtgggtcggtaccttccacggtctggcgcaccgcctgctgcgtgcgcaccacatggacgccaacctgccgcaggatttccagatcctcgacagcgaagaccagctccgtctgctgaagcgcctgatcaaggcgatgaacctcgacgagaagcagtggccgccgcgtcaggcgatgtggtacatcaacggtcagaaagacgaagggctgcgcccgcaccatattcagagcttcggcaacccggtcgagcagacctggcagaacgtctacaaggcctatcaggaagcgtgcgatcgcgccggtctggtggattttgccgagctgctgctgcgcgctcacgagctgtggctcaacaagccgcacatcctgcagcactaccgtgaacgcttcaccaacattctggtggacgaattccaggataccaacaacatccagtacgcgtggatccgcctgctggccggcgataccggcaaggtgatgatcgtgggcgatgacgaccagtcgatctacggctggcgcggggcgcaggtggagaacattcagcgcttcctcaacgatttccccggcgcgcaaaccatccgtctggagcagaactaccgctcaaccagcaacattctgagcgcggccaacgccctgattgagaataacaacgggcgtctgggtaaaaagctgtggaccgacggcgtcgacggcgaaccgatttcgatttactgcgccttcaacgagctcgacgaagcgcgcttcgtggtcaaccgcatcaaaacctggcaggacaacggcggcgcgctggagcagtgcgccattctctatcgcagcaacgcccagtcgcgcgtgctggaagaggcgctgctgcaggtggggatgccgtaccgcatttacggcggtatgcgcttcttcgaacgtcaggaaatcaaagatgcgctctcgtatctgcgtctgattgccaaccgtaacgacgacgcggcgtttgaacgcgtggtcaacacgccgacccgcgggattggcgaccgcacgctggacgtggtgcgtcaggcctcgcgcgaccgccagctgacgctgtggcaggcgtgccgcgagctgctgcaggaaaaagcgcttgccggacgtgcggccagcgccctgcagcgcttccttgagctgattgacgccctggcgcaggaaaccgccgacatgccgctgcacgtgcagaccgaccgggtgattaaagactccggcctgcgcaccatgtacgagcaggaaaaaggcgagaagggccagacccgtattgagaacttagaggaactggtgacggcaacgcgccagttcagctacaacgaagaagacgaggacctgatgccgctgcaggcgttcctctcccacgccgcgctggaggcgggcgaagggcaggcggacacctggcaggatgcggttcagctcatgaccctgcactccgccaaaggtctggagttcccgcaagtgtttatcgtcgggatggaagaggggatgttcccgagccagatgtcgctggatgaaggcggacgtctggaagaggaacgccgtctggcctacgtgggcgtgacgcgtgcgatgcagaagctgacgctgacctacgctgaaacccgacgtctctatggtaaagaggtctaccaccgtccgtcgcgctttatcggtgaactgccggaagagtgtgtcgaagaggtacgtctgcgggcgagcatcagccgtccggtcagccatcagcgcatgggctcgccgatagcggaaaccgacaccggctacaagctgggccagcgcgtgcgccattctaagtttggcgaaggcaccattgtgaatctggaaggcagcggcgagcacagccgcctgcaggtggcgttccaggggcaggggatcaaatggctggtggccgcctacgcgaagctggaaacagtctaactttcagaaaaatatcattattttgtaataatctgctagccttatacgttgaaggtcaattaatgcccttcagcgtttcgttgcgtgttgacgccacagttatagctggcgtaacatgcgcgcacgattacgctaagaggacattcgccttggacacacccagtagatactggctcaattccctgtcatccaggaacaactcctaaggctatctcctcttgctgatggccttagtggttgtcagcgactgcattattcccgtcgcgctgagtcaggctgtttaatggtctgaaacccaatttgtttctgtgtgcccaccgaactgtccgatattttttgcattgggagtcccggtcatgttgagcgcatttcaactcgaaaataaccgactgactcggcttgaagccgaagagtcacagcccctcattgatgccgtatgggtggatctggtcgagccggacgacgatgagcgccttcgcgtacaatctgagctggggcaaagcctggcaacgcgcccggaactggaagacatcgaagcatccgcccgtttttttgaagacgaagacggcctgcacattcactccttcttcttcttcgaagatgccgaagaccacgcgggcaactccaccgtggcgtttaccattcgcgacggtcgtctgtttaccctgcgcgagcgtgagctaccggcattccgcctttaccgcatgcgcgcccgcagccaggcgatggtggacggcaacgcctatgagctgctgctcgatctgttcgagaccaaaattgaacagctggcggatgaaattgaaaacatctacagcgatctggaaaagctgagccgcgtgatcatggaaggccatcagggcgatgagtacgacgaagcgctctccacactggcggagctggaagatatcggctggaaggtgcgtttgtgtctgatggatacccagcgcgcgctgaacttcctggtgcgcaaggcgcgtctgccgggcggtcagctggagcaggcgcgtgagatcctgcgcgatatcgaatccctgctgccgcacaacgaatccctgttccagaaggtcaacttcctgatgcaggcggcgatgggctttatcaacatcgagcagaaccgcatcattaagatcttctcggtggtgtccgtggtgttcctgccgccgacgctggtggcgtccagctacgggatgaactttgagtttatgcctgagctgaagtggagctttggctacccgggggcgattatctttatgatcctcgcgggcctggcgccgtatctgtactttaagcgtcgtaactggctttgagaatccgcccggtggcgctacgcttaccgggcctacagatcttgtaggccggataaggcgcagccgccatccggcaaaaaggcctacagccctttgcgccccctgcgctgggtataaatcgcatccgcaacaaagatcgccaatgccacccagataaaggcgaacgtcaccatcttatccgcacccggcacttcgccgtaaaacaccactgccagcaggaacatcagcgtcgggccaatgtactggaagaagcccagcgtggagagacgcaggcgcgtcgctgcaccggtgaagcacagcagtggaatggtagttaccacgcccgccgccatcagcatcaggttcagcgaccacggattgctgcccatgtggctggttgggctgtcggcgatgccgaagagataaatcgccgccaccggcagcagccacagggtttcaaacagcatccccgtctgcgcttccaccgcaatcttcttacgcaccaggccgtagaaggcaaagctgaacgccagaccgagggcgataattggcagcgagccgaacgtccacagctgcaccagcacgccgcagaaggccagaatcaccgccacccattgcatccggcggaagcgctcaccgaggaaaatcatccccagcacgatgttcaccagcgggttaatgaagtaccccaggctcgcttcgagcatgtgatggttattcactgcccagataaacagcagccagttaccgccaatcagcacggcagagagcgccagcaggaagatcttcttcggggtctgcagcagcgttttgacgcccgaccactgacggctgaggctcatcagcgcaatcataaagaaaaacgaccagatgacgcggtgagtgaggatctcatcagccggaacgtaggcgattagcttgaagtacgccggggcgataccccaaataaaataagcggcaagggcgagtaaaacgccctgccgcgtctgtttagcatccatcgggaaaatccgttacaaaaaagtgaatcaattttacccgattttgccgcctcaacccaccatataagtggcggttgcgctggcgatataaacctgttcttcgttgtgtaattccacgcgcgccacggcaactttattcccggcgcgcagcaggctgctggtacaggtgaagcggtttccgcgccccgggcgaagatagtcgacgcgcaaatcaatggtgcccatgcgcgccagacgctggcgaagttcgtcttcgttgatggtgtcatggcgcgtcagcgtactgcccacgcagaccagtcctgccgccacgtccagcgcggaggcaatcacgccgccgtgtaaaatactttgcgcccagttcccgaccatcatcggctggttattgaaactcagctgggcaaagtctttctcgtaacgctccagctccagtcccagcgcacggttaaacggcatatggtaaacaaatatctcgcccacgagttttaacacttcttcggcggtaagcatggctgacatgaggcatcacatccttattgttaacgaaatgttgattttatgcctcagcaacaaggaatgctactttcagaaacgaggatgcagcagttgtcgcagaagtctgtagaatgttcgccacataactattcaggtaattttactcttttgcaggagaacaccaccgatgcggacgtatctggcctggttactggcggcgatttcgctgcccctcacagcctatgcgcaggaagcgacaattaaagaggtgcatgataagcctgccgtgcacggtagcattatcgcgaaccttcttcaggagcatgacaatcctttcacgctctatccgtacgacaccaactacgtgatttacacccagaccagcgacctcaacaaagaggcgataagctcctataactggtctgataatgcgcgtaaagatgaggtgaagtttcagctcagcctcgcgttcccgttctggcgcggcattctggggccgaactcggtgctcggtgcgtcttacacgcagaagtcctggtggcagctctctaacagcggggaatcctcgccgttccgcgaaaccaactacgagccgcagctgttcctcggcttcgcaacggattatgaattcgccggctggacgctgcgtgacgtcgaagtgggctttaaccatgattctaacggccgttccgatccgacttcccgtagctggaaccgcgcctatacgcgcctgatggcgcagaacggtaactggatggtggaggtgaagccgtggtatgtggtcggcagcactgatgacaacccggacatcaccaaatacatgggctactaccagctcaaagtcggctatcagctgggcgatgccgtactgagcgcgaaggggcagtataactggaataccggttacggcggcgcggaagtgggcttaagctatcctatgacgaagcacgttcgcatctatacgcaggtctacagcggttacggcgagtcgcttatcgattacaacttcaaccagacccgcgtcggcgtgggcgtgatgctgaacgatattctctaggttgctcgaatgtttttgcgttaaacgttgaagtttctctctcaggcgctgaaaatagcgcctgttttatttttcgcatatggggttaatgtggcgcaggcggaagtattgaatcaggagtcgctggctaaacaggttttgcatgaaacctttggctaccagcagttccgccctggccaggaaaccatcattgaaacggtgctgcaaggccgtgactgcctggtggtgatgccgaccggcggcggtaagtccctctgttatcaggtgcccgcgctggtgcttaacggcctgacggtcgtggtatccccgctcatttcgctaatgaaagaccaggttgaccagctgctcgccaacggcgtcgcggcggcctgtctgaactcgacgcaaacccgggagcagcagcaagaggtgatggccgggtgccgcaccgggcagatccgcctgctgtatatcgcgccggaacgcctgatgctggataacttcctcgaccatctcgcgcactggaatccggttctgctggcggtggatgaagcgcactgtatctcccagtggggacacgatttccgcccggaatacgccgccctcggccagctgcgtcagcgcttccccgagctgccgtttatggcgcttaccgccacggcggatgacaccacgcgcctggatatcgttcgcctgctggggctgaacgacccgtatattcaggtcagcagcttcgaccgtccgaacatccgctacatgctgatggaaaaattcaagccgctggatcagctcctgcgctacgtgcaggagcagcgcggcaagtccggtatcatctactgcaacagccgcgcaaaggtggaagacaccgctgcgcgtctgcaaaatcgcggctttagcgcggcggcataccatgccgggttagagaaccacatccgcgccgacgtgcaggaaaaattccagcgcgacgacctgcaaatcgtcgtcgcgacggtggcgttcgggatggggatcaacaagcccaacgtgcgctttgtggtgcacttcgacattccgcgcaatatcgaatcctactatcaggaaaccggtcgcgccgggcgtgacggcttgcctgcggaagcgatgctgttttacgatccggccgatatggcgtggctgcgccgctgtctggaagagaagccgcagggccagctgcaggatatcgagcgccacaagctcaacgcgatgggcgcgtttgccgaagcgcaaacctgccgtcgtctggtgctacttaactactttggtgaagggcgacaggagccgtgcggtaactgcgatatctgcctggatcccccaaaacagtacgatggcctgatggacgcgcgtaaggcgctctcgaccatttaccgcgtaaaccagcgcttcgggatgggctacgtggtggaagtgctgcgcggtgccaacaaccagcgtatccgcgacatgggccacgacaagctgcctgtctacggtattggcaaggaccagagccacgagcactgggtcagcatcattcgccagctgattcacctcggctttgctacgcagaacattgctcagcactccgcgctacagctgaccgaagcggcgcgtccggtgctgcgcggtgacgttgaactgaagctcgccgtgccgcgtgtggtcgccctcaagccgcgcgtgatgcagaaatcctacggcggcaactacgaccgcaagctgttcgccaaactgcgcaagctgcgtaaggccatcgctgatgaagagaacatcccgccatacgtggtgttcaacgacgcgacgctcattgagatggccgagcagatgccgctcagcgccagcgaaatgctcagcgttaacggcgtcggcacgcgcaagctggagcgcttcggtaaagagtttatggcgctcatccgttcccacgttgatggtgatgatgaggagtagtcagccgggcgaaaaagtgccaggatgatgactcactgaattatttccccgcgagctaattatgttaatgctatttctcaccgtggcgttagtgcacatcgttgcgctgatgagcccgggacctgactttttcttcgtgtcgcaaacggccgtcagccgctcccgcaaggaggcgatgatgggtgtgctcggtatcaccatgggcgttatggtctgggcggcagttgcgctgctcggtctgaacctgatcctggcgaagatggcctggctgcataacatcattatggtcggcggcgggctgtacctgtgctggatgggctaccagatgctgcgcggggcgctgaaaaaagaagagaaaaaaccggaagagccaaaggtcgagctggcaacgggcggccgcagctttgtaaaagggctgctgaccaacctggcgaacccgaaagcgattatctattttggctccgtgttctcgctgtttgtgggagatagcgtcggtgcgggcgcacgctggggcatcttcctgctgatcgtcgttgaaacctttgcctggtttaccatcgtggccagtctgttcgccttaccggcgatgcgccgcggctaccagcgtattgcgaagtggatcgacggcttcgccggcgcgctgttcgccggcttcggcattcatctcatcatttctcgctaagcatgacgcgctgacgcaagcagcgcgccaaccagcataaacagcgaaccaaagactttattcagggccttcatctgcttaggccctttaatccacgccgcaatccgctgcgccagcgtcgcgtaaccaatcatgacgataatatcgacgataatggtggtcgcgcccagcactacgtactgcatcacctgcggctgatgcggcacgataaactgcgggaacagcgcggcgaggaaaacgatgctcttcgggttggtcaggttgacgaaaaccgcacgcttaaacagatgaccgcggttttgcgtctgagcgagcgtattcaggttaatggagcctgccgcgcgccactgctggatgccgagccaaatcagataggccgccccggcccatttcagcacttcaaaggccagtacggagcgggagaacagggtgcccagaccaatcccgaccagcacgatatgaatgcccagcccggtctgcaaaccggcaatggacgccgccgcgccgcgatagccgtggttgatggaggtggtcatggtgttaatggcgcccgagcccggtgaaaggctaaggatgatggatgtcagcaggtaagcgaaccaccactcgaaggtcatttgaaactcccgaattgtctgtttttatgccacaatacgctattgttgagtcattttgtgaccggttacgaaaaaacgatattccttggcttaggtgagtagaaacccaatgtttcagcagaaaaaggactgggaaacacgagaaaacgcatttgctgctttctccatggggccgctgaccgatttctggtgccagcgtgaggaagatgagtttacgggcgtcggcgatattccagtacgctttgtgcgttttcacgacaagaaaaatgaccgggtcattgtggtctgccccggacgtattgagagctacatcaaatacgccgaactggcctatgacctgttccatctgggcttcgatgtgctgattatcgatcaccgcgggcaggggttgtcagggcgactgttatcggatacccatcgcggccacgtggataacttcagcgattacgtcgacgatctcgccgcgttctggcagcaggaggtcgagccaggcccctggcggaagcgctatattctggcgcactcaatgggcggtgcgatttcaacgctgtttttacagcgccacgctcaccagtgcgacgccattgcgctcaccgcgccgatgtatggcatcgtcatgcgctttcctgactggatggtacgccatattctcgactgggctgagggccatcagcgcattcgggaaggctatgccatcgggacgggacgctggcgggcgctgccgtttgcgatgaacgtgctgacgcacagtcgccagcgctatcgtcgtaacctgcgtttttatgccgatgagccccgcctgcgcgtgggtggcccgacatatcactgggtacgggaaggtatccttgccggtgagcaggtgctggctggtgtcgacaacgacgacacgccaacactcctgattcaggcggaagaagagcgtgtggtggataaccgcatgcatgaccgctattgtgaactgcgcgctgccgccggtcgcccttgtgaagggggaaaaccgctggtcattaacggcgcgtaccatgagatcctttttgaaaaggacgctatgcgctcagtcgcgctcaacgccattgttgaatttttcaacaggcataattgatttttgttttccaccagaggttgaaacccctatgtaccaggttgttgcatctgatttagatggcacgctgctttcccctgaccacaccctgtcgccttacgcgaaagagaccctgaagcttctgaccgcccgtggcgtgaacttcgtatttgccaccggccgccaccacgtcgacgtggggcagatccgcgataatcttgagatcaaatcgtacatgatcacctccaacggtgcgcgtgtgcacgataccgacggcaacctgatctttacccacaacctggatcgcgatattgccgccgatctgttcggcgtggtgcacaacaacccggctatcgttacgaacgtttaccgtgacgacgactggttcatgaaccgccaccgcccggatgagatgcgtttcttcaaggaagccgtattcaactactccctgtacgagccaggcctgcttgagccggaggggatcagcaaggtgttcttcacctgcgacagccacgaagagctgctgccgctggaacaggcgatcaacgcccgctggggcgatcgcgtcaacgtcagcttctcaaccctgacctgtctggaagtgatggcgggaggcgtctccaaagggcacgcgctggaagcggtcgcgaaacgtctgggcttcgagctgaaagactgtatcgcctttggtgacggcatgaacgatgctgaaatgctgtcgatggcgggtaagggctgcatcatgcagaacgcgcatcagcgtctgaaagatctgcacccggagctggaggtgattggttctaacgctgacaacgcggtaccgaaatacctgcgcaagctgttccttgaataatcttcattcggttgtttattgctcagttgtcaactaaagagttcgctacaatgcctgtccttctttctgagagacaagcattgtggcgctactcattatcaccactatcctgtgggccttctcctttagcctgattggcgaatatcttgccggttcggtcgacagctacttctcggtgctgatgcgcgtggggctggcggcgctggtgttcctgccgtttctgcgcacgcgcgggcagtcgctgaaaacgattgtgctgtatatgctggtgggggcgatgcagctcggcatcatgtacctgttcagcttccgggcttacgtctacctgtccgtctcggaattcctgctgttcaccgtgctaacgccgctctatatcacgctgatctacgatttgctcagcaagcgccgcctgcgttggggatatctgctgagtgcggcgctggcggtgattggcgcggcaattattcgctacgacaaagtgagcgatcacttctggaccgggctgatgttcgtccagctcgccaacatcagcttcgccatcggcatggtgggctacaaacgcctgatggaaacccgtccgatgccgcagcataacgcgtttgcgtggttctacatgggggccgcgatcgtcgcggtggcggcgtggtttatgctgggtaacccgcaaaagctgcctaccaccaccgtacagtggggtgttctggtctggctgggcgtcgtggcttccgggttggggtacttcatgtggaactacggcgcgacgcaggtcgacgccggtacgctcgggatcatgaacaacgtacatgttcctgcagggctgctggtcaaccttgccatctggcagcaacagccgcactggccgagcttccttattgggggagcggtgatcctggcttcgctgtgggtccatcgacgctgggtcgctccgcgctccgcacaaacggaagatggtcgcacgcgtggttccgcgctgagcgaataaacgcctccgtaatcggctgacgctgctcgccatcgcgcacggcggcgtacagccggctccacagtccttcacccagggttttggtgaccaccaggccctggcgttcaaaactctccaccacccagtgcggcagcgccgcgatacccatgctggccgccaccatctgaatcaacagcaaggtgttatccacgcttttcagctgcgggctaatgcctgcgggctgcaggaagtgacgccatatatccagacgactgcgctgcaccgggtaaatcagcagcgtttccgttgccaggtcttccggcgtgatgcgcgttttggtcgccagcggatggtccggtgccagcaccaggcgcacctcataatcaaacatcggcgaatagtgcaggccgctgcgcggcagaatatcggacgtcatcaccagatccagctcgccctgctgcagcgagggctgcgggtcgaacgtcacgccggatttaaagtccatctccacctgcggccacttctggcggaagttctcaagcgcgggggtcagccactgaatacagctgtggcactcaatggcgatacgcagcgtggtctgctgcggttcgttacacgcctgcagcgcgctggcgatctgcggcagaacctgattcgccagctgaagcaaaatttcgccctgcggcgtaaagcgcagcggctggctcttacgcacaaaaagacggaagccgaggcgttgttccagatcgctgaactggtgagaaagggcggactgggtctggtgcagcgtggccgccgctgctgcgagcgatccgcagttccgcaacgcttgcagcgttttcaggtgttttatctcgatcatgaaagtccttcacttcgccatgaacattttgcgcttgaggaatatacagtacctgccaattatagaagtgtaaacatctggacgtctaaataacgaatttcacaaggggcataccatgacaatccgcaatcacactctcggtttccctcgcgttggcctgcgtcgcgagctgaaaaaagcgcaagaaagctactgggcggagaacgccacccgtgaagaactgctggcggtggggcgcgagctgcgcgcccgtcactgggagcagcagaagcaggcggggattgacctgctgccggtgggcgatttcgcctggtacgaccatgttctgacgaccagcctgctgcttggcaacgtgccggctcgtcatcagaacaacgatggatcggtagatatcgataccctgttccgcatcggccgtggccgtgcgccaacgggtgagccagcggcagcggcggaaatgaccaagtggtttaacactaactatcactatatggtgccggagttcgtaaaaggtcagcagttcaggctgacctggacgcagcttctggatgaagtggacgaagcgctggcgctgggccaccaggtgaaacccgtactgttggggccggtgacctatctgtggttggggaaagtcaaaggcgagccgtttgacaggctcagcctgctgaaggatattctgccggtctataagcaggtgctgattgagctgggcaagcgcggcattcagtgggtgcaaatcgacgaacccgcgctggtgctcgagctgccgcaggagtggcttgatgctttcaaaccggcttacgatgcactcaacgggcaggtgaagctgttgcttaccacctactttgaaggtgtgacgccgaacctcagcaccatcaccagattgccggtgcagggtctgcacgttgacctggtgcacggcaaagatgacgtcgcagaactgcacaagcgcctgccagcagactggctgctctccgccggtctggtcaacggccgtaacgtctggcgcgccgatctgaccgagaaatacgcacaaattaaagacatcgttggcaaacgtgagctgtgggtggcctcgtcctgctcgctgctgcacagtccgatcgatctgagcgtggaaacccgtctcgaccctgaagtaaaaagctggtttgccttcgccctgcaaaaatgtgaagagctggcgctgctgcgcgatgcgctgaacagcggcgacacggcggcgattcgcgaatggagtgcgccaatccaggcgcgccgccactcggctcgcgtgcacaacccggcggtggaaaaacgcctgtcggccatcaccgctcaggacagccagcgccagagcccgtatgaagtccgtgccgaagcccagcgcacccgcttcaacctgcccgcgtggccaaccaccactatcggttccttcccgcagaccaccgaaatccgcggcctgcgtctggacttcaaaaaggggaatctggatgcgaatcactaccgcaccgggattgccgaacacatcaagcaggcgattaccgagcaggagcggctggggctggacgtgctggtgcacggcgaggccgagcgtaacgacatggtggaatacttcggtgaacacctggacgggttcgtctttacccagaacggctgggtacaaagctatggctcccgctgcgtcaagccgccggtggtcatcggtgacgtcagccgtccggagccgatcacggttgagtgggcgaagtacgcccagtccctgaccgacaagccggtaaaaggcatgctcaccggtccggtgaccattctttgctggtccttcccgcgtgaggacgtgacccgcgagaccatcgcgaagcaaatcgcgctggcgctgcgtgatgaagtggcagatctggaagctgcaggcataggcatcatccagattgacgaaccggccctgcgcgaaggtctgccgctgcgccgcagcgactgggatgcctacctgaagtggggcgtggaggcattccgcatcaacgccgcggtggcgaaggacgacacgcagatccacacccacatgtgttactgcgaatttaacgacatcatggattcgatagccgcgctggacgctgacgtgatcaccatcgagacctcgcgttcagacatggagctgctggagtcgtttgaagagttcgactacccgaacgaaatcggtccgggggtgtacgacatccactctccgaacgtgccgagcgtggagtggattgagtcgctgctgaaaaaagcggcccagcgcattccggctgagcgtctgtgggtgaacccggactgcggcctgaaaactcgcggctggccggagacgcgtgccgctctggcgaacatggtgaaggcggcgcaaaacttgcgtcaggcttgatgatgcgtaggcccggtaaggcgtagacgccaccgggcttttttttacgcttttttaccgccgtactggctgaaccacgccagcattctctgccagccgtctttggctgattccgcgtgatagctcggacgataatccgcgttaaacgcgtgcccggcatccggatacaccacgatctccgccttcgcattggccgcacggagcgcatggcgcatggtctctaccgaatccagcgaaataccggtgtcctgaccgccataaagccctaacaccggcgcatttaactccgtggcgatatccacgggatgtttcggtgaattgagcgttttttcacctaccagtttaccgtaccaggccacagcggctttaagctgcgggttatgcgcggcatatagccagctgatgcgtccgccccagcagaaaccggtgaccagcagacgatggggatcgcccccgttgcgcgccgcccagctggcgacgtggtcgagatcggccagcacctgcgcgtccgggactttgctgaccaggttgctgagcaaggtgggaatatcgctgtagtcgttcggatcgccctggcgaaagtagagctctggcgcaacggccagatagccttccagcgccagccggcggcagaggtcgcgaatgtgttcgtgaacgccgaaaatttcctggaccacgattacgatgggcagcggaccgtctgccgattttggtcgggcgtggtaagcaggcatattctctccctgcgagggaatagaggtctcacccgccgtgatggcctcttcagacgttgagacgatggttgaggcatgcggggccgcagcaggtgcaaaaccggttttttcagtcatggcattctccgtaccaatgagttagcgcaaaggtaaatatagtcaccaggttaacaactcacagtgccttaaacggtctatcttttgtgctgcacctgacgatataacttgttaatgtgatgtaaatcacttttttatggaaattcaatgcaatcattttcattcatggtgagatgtgtcacgaaattatgctttccgcttctgtaaagtaccgttttacttcttctgactaaccgacccacagaggagtcacctatgtctaagtctgatgtttttcatctcggcctcactaaaaacgatttacaaggggctacgctcgctatcgtccctggcgatccggagcgtgtggaaaagatcgccgcgctgatggataagccggttaagctggcagcccatcgtgaattcaccacctggcgcgcagagctggatggtaaagccgtgatcgtgtgttctaccggtatcggtggcccgtctacgtctattgctgttgaagagctggcacagctgggcattcgtactttcctgcgtatcggtacgaccggtgctattcagccgcacatcaacgtgggcgacgtgctggtcacgaccgcgtccgtgcgtctggatggcgcaagcctgcactttgcgccgatggaattcccggcagtagcagactttgaatgtaccaccgcgctggttgaagccgcgaaatccgttggcgcgaccactcacgtgggtgtaaccgcttcgtccgataccttctatcccggtcaggagcgttacgacaccttctctggccgcgtggtaagccgcttcaaaggctctatggaagagtggcagtccatgggcgtgatgaactacgaaatggaatccgccacgctgctgaccatgtgcgcaagccagggcctgcgtgccggtatggtggcgggcgttatcgtcaaccgtactcagcaggagatcccgaacgctgaaaccatgaagcagaccgaaagtcatgcggtgaaaatcgtggttgaagccgcgcgtcgcctgatctaatcctctcctttcgaaatcaaaggccgacacgttcggcctttattttttgcgtagcgcctcgcaggaaaaccctttcaaactggacgtttatacagcacaatcttattttgtgcgggtaatacgttgatgcagggggcattgtggatatctcagtcctgatttatgcggtgattgcgctggcgggcgtggcgataggctggctcatttccagctatcagcatgcacagcagaaggccgatcagctggctgaacgcgaagagatcgtcgccgaattaagcgcggcaaagcagcagcttgcgctgagtgatcactggcgagaggagtgcgagttactcaacaacgagctgcgcaacctgagagatatcaacacctcgctggaggccgatctccgcgaagtgaccacccgtctggaatccactcaactgcatgcggaagataaaatccgccagatgatcaacagcgagcagcgcctcagcgaacagtttgaaaacctcgcgaaccgtatttttgagcacagcaaccgccgcgttgacgagcagaaccgccagagcctgaacagcctgctgacgcccctgcgtgaacagctggacggcttccgccgccaggtacaggacagctttggtcaggaagcccgagagcggcacaccctggcgcatgaaatccgcaatctccagcagctgaatgcccagatggcgcaggaggcggtcaacctcacccgcgcgcttaaaggggataacaaaacccagggcaactggggagaagtggtgctgacccgcgtcctggaagcctctggcctgcgggaagggtatgaatacgaaacgcaggtgagtatcgaaaacgatgcccgctcgcgaatgcagccggatgtgattgtgcggctgccgcagggcaaagatgtggtgattgacgccaaaatgacgctggtggcgtatgagcgttacttcaatgcggaggatgactacacccgagaatcggcgctgcaggagcacattgcctccgtacgcaatcatattcgcctgctcggcaggaaagactatcagcagctaccggggctgcgctcgctggactatgtcctgatgtttattccggtcgaacccgcgtttctgctggcactcgacaggcagcctgaactcatcaccgaagcgctcaaaaataatattatgctggtcagccccaccacgctgctggtggccttacgcacgattgcgaacctgtggcgctacgagcaccagagccgcaacgcgcagcagattgccgaccgcgccagcaagctgtacgacaaaatgcgcctcttcgtggacgacatgtcctcagtcgggcagagcctggaccgcgcgcaggataattaccgtcaggcgatgaaaaaactcgcctcaggacgtggcaatcttctggcgcaggccgaatcattccgcagcctgggggttgaggtgaaacgcgagattaatccggaattggttgaacaggctaccgcccaggacgacgagtttcgcctgcgtgaaggggcggacgaacaaaagacaaacagtgaagacaacacgttagcggtggatttatcaccagacgagactccggcgcgtttctttcgcggtggttgaaacgtagggcaattgcgcccaatctgttacacttcacgaacattttactgataagcaggctctgagatggttgacgattcacaagacacaacgcactttggctttcagactgtcgccaaagcgcagaaagctgacatggtggcccacgtatttcattccgtggcggcgaagtacgatgtgatgaatgacctgatgtcgttcggcattcatcgcttgtggaagcgcttcactatcgactgtagcggcgtgcgtcgtggacaaacagtgctggatttagccggtggtacgggcgatttaaccgcgaaattctctcgtctggtgggcgaaaccgggcgcgttgtcctcgccgatattaatgactccatgctcaaaatgggccgcgaaaagctgcgtaacatcggcgtggtggggaatgtggaatatgtgcaggcaaatgccgaagcgctgccgttcccggataatacctttgactgcatcacgatctccttcggtctgcgtaacgtgaccgataaagaaaaagcgctgcgctccatgtatcgcgtgctgaagccgggtggacgcctgctggtgctcgaattctccaaaccgattatcgagccgctgagcaaagcttacgacgcctattcattccacgtgctgccgcgcatcggtgagctggtggctaacgacgcggaaagctatcgctatctggcggaatctatccgtatgcacccggatcaagacaccttaaaagccatgatgcaggatgctgaattcgagaacgttgaatatttcaacctgacggcgggtgtcgtcgcgctgcatcgcggttacaagttctgagtggaggtgtcccgtgccctttaaacccttagtctccgcaggtatcgaaaacgtactgaatgcctttctctatcgtgcgccagcgctgaaagctgcgcgtcagcggctaaacgggaaggtattacgcattgttttaaaagagttctcgacgccgcttgtgctggtcttcagcgaacgccagcttgacgttctgggggcgtgggaaggtgacgccgactgctcggtcatcacgcacatgagcgtgctgccaaaactgcgcgatcgccagcaattaacggcgcttatccgcagcggtgagctggaagtggaaggcgacattcaggtcgtgcagaacttcgttgcgcttaccgatctggcggagtttgatccggcagagctgctcgcgccgtttatcggtgacattgccgccgaaggcatcgggaaggttcttcatggtggcgcgtcctttgcgcgtaaaagcctgctacgtcagcaacgctatgcggcggaagtactgactgaagagtggcgaatggcccccggaccgctggaagtggcatggtttgcggaagaaaccgcggctgttgaacgtgcggttgatgcgttaaccaaacggctggaaaaactggagggcaaatgacgcctggtgaaattcggcgcctctacttcattattcgtacctttttgagctacgggctcgacgagctgatccctaaaatgcgtatcacgctgccgcttcgtatctggcggcggatgctgttctggatgcctaaccgccataaaggtcagccgctgggcgaacgcctgcgcctggcgctgcaggagcttggcccggtatggattaagttcgggcagatgctgtcgacccgccgcgatctctttccgccgcacattgccgatgaactggcgatgctgcaggaccgtgttgccccgtttgacggggtgagggcgaagaaacagatcgaagaggcgatgggtaatcttcccgttgaaacctggtttgacgatttcgaaatagaaccgctggcgtcggcttctattgctcaggtgcacactgcgcgtctgaaagaaaacggcaaagaggtggtaattaaggtgatccgcccggatatcctgccgatcattaaagccgacatgaagctgatttaccgtctggcccgttgggttccgcgtttattacctgatggccgccgactgcgcccgatggaagtggtgcgggaatatgaaaaaacactgattgatgagctaaatctgctgcgcgaatcggcaaacgctattcagctgcgtcgcaactttgaaaacagcccgatgctttatgtccctgaagtctattctgactactgcagccagaacatgatggtgatggagcgtatctacggtattccggtttcggatgtggtggccctggagaagcagggaacgaacatgaagctgttggccgagcgtggcgtgcaggtcttcttcacccaggtgttccgcgacagctttttccatgcggacatgcacccggggaatatcttcgtgagctacgagcaccctgaggatccgaagtatatcggtatcgactgcgggattgtggggtcgctgaataaagaagataaacggtatctggccgagaacttcatcgcgttcttcaaccgcgactaccgtaaggtggccgagctgcacgtcgattccggctgggtgccgccggataccaacgtcgaagagttcgagtttgcgatccggaccgtttgcgaaccgatttttgaaaaaccgctggcggaaatctcctttgggcatgtgctgttgaacctgttcaacacggctcgccgctttaatatggaagttcagccacagctagttttacttcagaaaacactactttacgttgagggtgtaggccgacagctctatcctcagttagacttgtggaagaccgcgaaacccttcctggaatcctggattaaggatcaggttggcattccggcgctggtgcgctcgctgaaagagaaaggcccgttctggatagaaaaaatgcctgaaattcctgaactggtttatgacagtttgcgtcagagcaagaaccttcagcacagcatggataaaatcgctcgcgaacttcagtccagccgtgttcgccagggccagtcacgctatctctttgggattggcgcaacgctgctgctgagcggcacgctgctgctgatcaaccgcccggagtggcagatgatgcccgcctggctgatggccgccggggtggttgtctggcttgccggatggcgaaaaacgcgctgagtttgcgtcgctatcgacaggtcgcatacgtataatgcgacctgacttattaatcatctatccctgaggaacatgtatgggtggtatcagtatctggcaattgttgatcattgccgtcatcgtcgtgctgctgtttggcaccaaaaagctcggttctattggttccgatctgggcgcgtctatcaaaggcttcaagaaagcgatgagcgatgatgagagcaagcaggataaaaccagccaggacgctgactttactgctaaatccatctccgacaagcaagaagaagccaaaaaggaagacgctaaacgccacgataaagagcaggtgtaagtcgtgttcgacattggttttagtgagctcctgctggtctttgtgattggcctgatcgtgctggggcctcagcgtctgccggtggcggtgaaaaccgttgcgggctgggttcgtgcgctgagatcgctggcatcgaccgttcagaatgaactggcccaggagcttaagctgcaggaatttcaggaaagcctgaaaaaggttgagaaggcgagcatggataacctgacgccggaactgaaagcgtcaatggatgagctgcgcgaagcggcggaatccatgaagcgctcctatagcatcaacgatcctgaaaaagcgagcgatgaagcgaacaccatccataacccggtggtgaagggcagcgaagaacagcgtgagggcgtcacgcctgccagcgctgaacatcaggctgctgcgcctgaacagacgccgcaggaaaccgaagtgaaaaaacaggtgcagccggaaaagcccgtggttaacgctgccgaggcaaagcccgccgcgcccgtttccgaatcatccccctcgtcgagtgataaagcgtaaacatggctgtagatgatactcaaccgctgattacgcacctcatagagctgcgtaagcgtctgttaaactgcattattgcggttctcgttatttttctatgcctggtctatttcgccaacgatatctaccaggtggtttctgcgccgctgatcaagcagatgccgctgggcgcaacgatgattgcaaccgacgttgcttctccgttctttacccccatcaagctgaccttttgggtatcgttgattgcctctgcgcccgtcattctgtaccaggtgtgggcctttgtggcgccagcactgtataagcacgaacgcaagctggtcatcccgctgctggtgtccagctcgctgcttttctatatcggcatggcgtttgcctatttcgtcgtcttcccgctggccttcggcttcctgacgcataccgcgccggaaggcgtccaggtgtcgacggatatcgccagctacctcagcttcgtgatggcgctgtttatggcgttcggcgtggcctttgaggtaccggtggccatcgtgctgctctgctgggtaggggtcaccacgccggatgacctgcgtaagaagcgtccgtatatcctggtcggcgcatttgtggtcggcatgctgctgaccccgccggatgtgttctctcagacgctgctggccataccgatgtactgcctgtttgaggttggcgtcttcttctcacggttctacgtgggtaaagggcgtcgatcggatgacgaagacgctacgtccgacaagaccactgaagagtaaaaccagccgcccgtcagggcggttgttatatggggattcgcatgtttgatatcggactcaacctgaccagctcgcagtttgcgaaagatcgcgatgaggtggttgcgcgcgcgtttgccgctggggtgaaagggctgctgctgacgggcaccaacctgcatgagagcgagcaggcgcagcagctggcgcaacgctacgaacgctgttggtctaccgctggcgtgcatcctcacgacagcagccagtggaccccggaaagcggggaaaccctgcgcaggctggcgaagacaccagaagtggtggcgattggcgaatgcggcctcgatttcaaccgtaacttttccacgcctgaagagcaggaaaaggcattcactgcccagcttgcgctggcggcagagcttgaaatgcccgtatttatgcactgccgcgacgcgcatgagcgtttcctgactctgctggatccgtggctcgagaaactgcccggcgcggtgctgcactgcttcaccggctcacggcaggaggcgctggagtgcctggaacgcgggctttatctgggcattaccggctgggtttgcgacgagcgccgcgggcttgagcttcgggagctgctacccgcgatcccggctgaccggttgctccttgaaacggatgcgccctatctgctcccgcgcgatatgcaacccaaaccggcatcgcgacgcaatgagcccgcttatctggggcacatagttgagcgcgtcgcgacgtggcgcggagaggatccgcactggctttccgcacagacggatgacaacgtgcgtaatctgtttgggataaacgtttaaagtttgcggaagtcggtgtttttaacgctctgcagcacctgcttgttcagcagattaagcaacagcatagagcgcgcttccccgtccggctcggcaaaaatcgcctgcaggccttcgaaagccccttcggtaatcacgacgctatcgcccgtgtagggcgtttccgggtcggtaaggtcttcgggctgctgataaatcgacagctggtggatgaccgatgagggaaccgtcgcggggtgagcgccgaagcgaacaaaatggctgacgccgcgcgtggcgctgatggtggtggtgtggatcacctccggatcgaactccacgaacaggtagttcgggaacaacggctcgctaacggttgtgcgcttcccgcgctgcattttttcaagcgtgatcacgggcgtcaggcaattgactgactgacgttcaagatgttcctgcgcgcgctgaagttgcccgcgtttgcaatacagtaaataccaggcctgcataatcactctttcccttagttcggggcgcaagcatatcaaaaccctggcgggatcgctaagttgattataatgggcgaaaatgggacagaacgcataacttcacgctaatttaacaaaattacagcatcaagcagtcttacgccgtataatgaagcgcttacagagaggccatgattaactgcatgaaataccacgatctccgcgacttcctgacgctgctggaaaagcagggtgaactcaaacgtataacacttcctgttgatccttatctggagatgacagaaattgctgaccgcaccctgcgtgccggtggccccgcattactgtttgaaaatccgaaagggtacgccatgccggtgctgtgcaacctgtttggtacaccgcgtcgcgtcgcactggggatggggcaggaagacgtcacggccctgcgcgaagtcggtaagctgctggccttcctgaaagagccggagccgccgaaaggcttccgcgatctgttcgacaagctgccgcagtttaagcaggtgctaaacatgcccaccaaacgcctgcgcggcgcgccctgccagcagaaggtgctggaaggcgatgcggttgatttgactaaaatccctatcatgcagtgctggccggaagatgccgcgccgctgatcacttggggactgaccgtcacgcgcggtccgcacaaagagcgccagaatcttggtatttaccgccagcagttgattggcaagaataagctcatcatgcgctggctgtcgcatcgcggcggcgcgctcgatttccaggagtggtgtgctgcgcgtccgggtgaacgtttcccggtgtctgtcgcgctgggcgccgatccggccaccattctcggggccgtcacgcccgtaccggatacgctctcggaatatgcctttgcaggcctgctgcgcggaacgaaaacggaagtcgtgaagtgtatctcaaacgatctcgaagttccggccagtgcagaaattgtgctggaaggttacattgagcagggtgaactggcgccagaaggcccttacggcgaccacaccggctattacaacgaagtggataacttcccggtgtttaccgtgacgcacattacgcagcgtgaagatgcgatttatcactccacgtataccgggcgtccaccggatgaaccggcagtattgggcgtggcgctgaatgaagtgtttgtgccgatcctgcaaaagcagttcccggaaattgttgatttttatctgccgcctgaaggatgctcgtatcgcctggcggtggtcacgatgaagaagcagtatcctggtcacgcgaaacgcgtgatgatgggcgtgtggtctttcctgcgccagtttatgtataccaaatttgttattgtctgcgatgatgacgttaacgcccgcgactggaatgacgtaatctgggccattaccacgcgaatggacccggcgcgcgatacggtgttagtcgaaaacacgccgatagattacctggattttgcctcgccggtttccggccttggctcaaaaatgggactggatgccacaaataaatggcctggcgaaaccgatcgtgaatggggtcgcccgatcaaaaaagatcctgctgtgaccgcgcgcattgatgcgatctgggacgaactggccataatgaataacggtaaaccctgagctgaccgttaagccctatagacttcccgacagagagagcgaatgacaaccttaagctgtaaagtgacctcggtagatgccatcaccgacaccgtatatcgcgtccgtttagtgccagaagcgccattctctttccgcgcgggtcagtatctgatggtcgtgatggatgagcgtgataagcgtcctttctctatggcctcaacgccagcggagcaggaatttattgagcttcatattggtgcgtcagagcttaacctgtatgcgatggccgtcatggaccgcattctgaaagagcgcgagatagtggtggatattccgcacggcgaggcatggttacgtgatgacgaagaccgtccactgatcctgatcgctggtggtacaggcttctcctacgtgcgctctattctgttgaccgccctggcgcgtaacccggaccgtgatatcaccatctactggggcggccgcgaagagaagcacctgtatgacctgtccgaactcgaagcgctgagcgtcacccatcctaacctgcgcattgagccggtggttgagcagccggaagagggctggcgcgggcgtagcggtacggtactgacggcagtgctgcaggatcacggtacgctggcggggcatgacatctatattgcagggcgtttcgagatggcgaaaatcgcccgcgatctgttctgtaacgaacgtgatgcgcgtgaagaccgcctgtttggcgatgcgtttgccttcatttaaataaaaaacccgcccctgacaggcgggaagaacggcaactaaactgtttctcttcaccagtgacacgactggcggcgaggtacctctcgtaggccgggaaagcgcagcgcctcccggcaaaagcccgatggcgcgatgcttatcgggcctacgttatagccttacactctctcaaacaccgtcgcgataccctgacccagaccgatacacatcgttgccagaccaaactgggcatctttgcgttccatcaggttgatcagcgtcgtgctgatacgcgccccggaacagcccagcgggtgtccgagggcgatcgcgccgccgttgaggttaatcttctcgtcgatctgctccatcagccccagatctttaatgcacggcaggatctgcgcggcgaacgcttcgttcatctcaaacagatcgatgtcgctggcggttaagcccgcttttttcagcgccagctttgaagccggaaccgggccgtagcccatgatcgacggatcgcagcccacgaccgccatcgaacgcacgcgggcgcgaggcgttaaccccagttcgcgggcgcgactttcgctcatcaccagcatcgcggcggcgccgtcggacagcgccgacgaggtccctgccgtgaccgtaccggtgacggggtcaaacgccggacgcagggtggaaagcgcttcgacggtggtttccgggcgaatgacttcatcgtagctgaactgcttcagaacgccgtctgcatcgtggccgccggtcgggatgatctcgttcttaaaggcaccggactgcgtggcggcccaggcgcgagcgtgagagcgcgcggcaaaggcatcctgcatttcgcggctgatgccgtgcaggcgggagagcatctcggcggtcagacccatcatccccgcagctttcgccacgttgcggctcatccccgggtggaaatcgaccccgtggctcatcgggacgtgacccatatgctcgacgccaccgaccaggcaagcctgcgcatcgccggtcatgatcatgcgggccgcgtcgtgcagcgcctgcattgacgaaccgcacaggcggttgacggtgaaggccggaaccgaatgcgggatctccgccagcagcgacgcgttacgggcgatgttgaagccttgctccagggtctgctgcacgcagccccagtagatatcgtccagcgcagccggatccagcgccgggttacgcgccagcaggctacgcatcaggtgcgcggagaggtcttccgcacgcacgttacggaacgcgccgccttttgaacggcccatcggggtgcgaatcgcatcaacaatgacaaccttttccattgtgactccttaagccgttttcagctcgccaaccggacgggctggctcaactgcgggatagtagggttcgttatggcgcgctttgttacgcagcccttccggcacttcatacagcgggccgaggtgctgatactgctgggccatatcgagatagcgggcgctgccgagcgtgtccagccagcggaacgcgccgccgtggaacggagggaagccgaggccatacaccagcgccatgtcggcttctgccgggctggcgataatgccttcttcgaggcaacgcaccacttcgttaatcatcgggatcatcatccgggcgatgatttcatcgtcggtgaagtcgcgttttggctgactgacgtcggccagcaggccatccaccgccggatcttcttctttcttcggtttgcctttgctgtcttctttatagcgccagaagcccaggccgtttttctgaccgaagcggttagcgtcgaacagcgcgtcaatggcgtcgcgatagtctttctgcatgcgctgcgggaaacctgccgccatcaccgcctgggcgtggtgggcggtatcaatgcccacaacgtccagcagatacgccgggcccatcggccagccgaactgtttttccatcactttgtcgattttgcggaagtccgcgccgtcgcgcagcagctggctaaaaccggcgaagtaagggaacagcacgcggttgacgaagaagcccgggcagtcgttaacgacgatcggcgttttgcccatcttgctggcccatgccaccactttggcgatggtgtcgtctgaggttttttccccgcggatcacttcgaccagcggcatacggtgtaccgggttgaagaagtgcataccgcagaagttttccggacgcttcagcacgctcgccagttcgctgattggaatggtggaggtgttagaggccagaacggtacccgggcgaaccttgtcttccgtttccgccagcaccgcttttttcactttcgggttctcgacgacggcttcgaccaccacgtcgacacgatcgaaaccgctgtattccagcacgggctgaatggtggagatcacgcctgcgagcttcagtccgtcaattttgccgcgttccagctgtttattcagcagcttggccgcttcggtcatgcccagcgtcagggatttctcgttgatgtctttcatcactaccggcacgcctttccaggcagactggtaggcgatgccgccacccataatgcccgcgccgagtaccgccgcatgttttggcgtctcaacgtttttggtcagctgtttggctttgcctttcacgaactgatcgttcaggaagataccgaccagcgcgcgagcctcattggtgtgcgccagcgggacaaagctctgattttcgagctttagcgcttcatcgcgcccgaaacgggcagccgcttcaatggttttcaccgccgcgatcggcgccgggtagtgtttacccgccgtctgcatcaccatgcctttggcgatggtgaagctcatggtggcttcaatcttgctgagttttaacggttccagcttcggctggcgtttggccttccagtcgagctcgccgttaatggcctgacgcagaatggcgagtgcgccttcaataagcttctccggtttcacgacgccgtcgaccaggccaattttctgcgcctgttcggcgccgacgtctttacccgcggcaatgatctccagcgcgctgtcggcgcccagcatgcgcggcatacggacggagccgccaaagcccggcataatgcccagcttggtttccggcaggccgatgcgcagatccggcgtcgccaggcggtagtcggtcgccagcacgcactcacagccgccgcccagcgcgtagccgttaacggcggaaatggtcgggacaggcagatcttccagacgattaaagacgctattggcaaagtgcagccactggctcagctgttcttccggcaccaggaagagcgaaaggaattcggtgatatcggcaccgacgataaaggccgctttgttcgagcgcagcagcagcccttttaattcagtttgtttttccagaacatccagcgcctggccaagactggccaccgtcgcggtatcgagcttattgactgagccgggggcatcgaacacgagttcggcaatgccatcttccagccagttgaggtacagggtgtcgcctttgtagagcatgtcagtctcctgaatccagcaagtggatctggtcataccagatgagtcggagtgtgggatttatgttaataaaatgcaaattactcattaagaaattgctgcattgatcacggtcggtggaaatcacgcaggcggagtgaggtgtgctaagatgcgatgacttgaggtcaaaaaacgaaaggaataatgatggactcactggcttcgctttataaaaatcatatcgttaccctacaggaacgtacccgcgatgtactggcccgctttaagctggatgcgctgctgatccactccggcgagctgatgaatacctttctggatgaccacgcttatccgtttaaggtgaacccacagtttaaggcctgggtaccagtgacgcaggttcccaactgctggctgctggtggatggtgtgaacaagccgaaactgtggttctacctgccggtcgattactggcacaacgttgagccgctgccgacctctttctggacggaggaaattgaggtcattgcgctgccaaaagcggacgggattggcggccagctgcctgccgcgcgtggcaacatcgcttatattggccctgttccggagcgtgcattaagcctggatattgcggcagacaagctcaacccgaaaggggtgctggattacctccactattaccgcgcgtataaaaccgactacgaactttactgcatgcgtgaagcgcaaaagaccgcggtaaacggtcaccgtgcggcgcatgaagccttccagtccggcatgagcgagttcgatatcaaccaggcgtacctgaccgccaccggtcatcgcgataccgacgtgccgtacagcaacattgtcgcgctcaacgagcacgcgtccgtcctgcactacaccaaactggatcaccaggttccttcagaaatgcgcagcttcctgctggacgcaggggcagagtacaacggctacgcggccgatctgacccgtacctgggcggcaaatgcggataccgattttgcacagctgatcaaagacgtgaacgatgaacagctggcgctgattggcaccatgaaggcgggaaccagctatgtggactaccacatccagttccatcagcgcattgctaaactgctgcgtaagcatcagattgtgaaagacatgagcgaagaggcgatggtcgagaacgatctgaccgggccatttatgccgcacggtatcggccacccgctgggcctgcaggtgcacgacgttgcgggctttatgcaggatgataccggtacgcacctggcggcaccgtctaaatatccttacctgcgctgcacccgtattctggagccgcgcatggtgttgacgattgaaccggggatctactttatcgaatccctgctggcgccgtggcgtgaaggccagttcagcaagcacttcaactgggcaaaaattgacgcgctgaagccgtttggcggcattcgtatcgaagataacgtggtgattcacgaaaacggtatcgagaacatgacgcgagacctgaagctggcctgatggaaagctggctgataccggctgaaccggtcacctttgttgaggaaatcaagaaaagccgctttattacgctgctggcgcataccgacggcgtagaggcggcaaaagcgtttgtcgagtccgtccgggctgagcatcctgacgcccgtcaccactgcgtggcgtgggtagcagggccgccggacgattcgcagcagctggggttttccgatgacggtgaaccggcgggcacggccggtaaacccatgctctcgcagctgatgggtagcggcatgggtgaaattaccgccgtggtggtgcgctactacggcggcatcctgttaggtacgggtgggctggtaaaagcgtatggcggcggcgttcagcaggcactgaatatcctgaagaccacccgcaaaacgcctctcaccgaatatactttgttatgcgattacgcccagctctcgggtattgaagcgctgctgaggcagtttaacggtgtcatcgcacacagtgaatatcaggcgatggtgcaattacgcgtggcgcttcctcaggcggaactggctgctttttcagcaaaactggctgattttagtcgtggttcgttgcaattgctgccgattgaagaataatccccacctcacttttgaataccaaaggaagcggcagagatgcattttcgtgccataacccgaatcgttggactgctggtcatactcttttccgggacgatgattatccctggactggtggcgcttatctaccgggacggggcggggcgggcatttacccagaccttctttgtcgcgctggcgatcggctccctgctgtggtggccgaaccgtcgtcagaaaggtgagctgaaatctcgcgaaggctttctgattgtggtcctattctggacggtgttggggagcgtcggttcgctgccctttatcttctctgaacagcctaacctgagcatcacggatgccttctttgaatccttctccggcttaacgacgaccggggccacgacgctggtggggctggattcgctgccgcacgcgattctcttttatcgccagatgctgcagtggttcggcggtatggggatcatcgtcctggcggtggccatcctgccgattctgggcgtcggggggatgcagctctatcgcgccgaaatgccgggaccgctgaaagataacaagatgcggccgcgtattgccgagacggcgaaaaccctgtggctgatttatgtcttgctgacggtagcctgcgcgctggcgctatggtttgccgggatgcctgcgtttgatgctatcggacacagttttgcgacgattgccatcggcgggttctccacccacgatgccagcgtgggctatttcgacagcccaacgattaacactatcattgccattttcctgctgatctccggctgtaactacggcctgcacttctctttactgagcgggcgcagcctgaaggtgtactggcgtgaccctgagttccgcatgttcattggggtccagctgacgctggtgatcatctgtacgctggtgctgtggttccatgatgtctataactccgcgttgaccacgctaaaccaggccttcttccaggtggtgtcgatggcgacgaccgccgggtttaccacggacagcatcgcccgttggccgctgttcctgccggtgcttctgctctgttccgcgtttatcggcggctgtgcggggtcgacgggcggtggtctgaaggtgatccgtattctgctgctgttcaagcagggcaaccgtgagctgaagcgtctggtccaccccaatgcggtctacagcattaagctggggaaccgcgcgctgccggaacgtatcctcgaagcggtgtggggattcttctcggcgtatgcgctggtctttatcgtcagtatgctggcgattatcgcgacgggagtggatgatttctccgcctttgcgtccgtcgtcgcaacattgaataacctcgggcctggcctgggcgtggtggcggataactttgccagtatgaacccggtcgcgaaatggatcctcatcgccaatatgctgtttggtcgtcttgaggtctttacgctgctggtgctgttcacccctacattctggcgcgagtaaggagccgttgatgaaaacactgattcttttttctacgcgagacggacaaacgcgtgagattgccgcataccttgcatcggaattaaaagagttgggtatttactcggatgtggtgaacctgaaccgtgcggaacagattgcctggcaggattacgaccgcgtggtgattggtgcatctattcgttacgggcatttccatccggcgctggatcgctttgtgaaaaagcacacggcagtactaaacaaaatgccaggcgcgttttactcggtcaatctggttgcgcgtaaagcggagaagcgcacgccacagaccaacagctacacgcgcaagtttttactcagctcgccgtggcagccagacctgtgcgccgtttttgctggcgcgctgcgctaccctcgctaccgctggtatgaccgctttatgatccgtctaattatgaagatgacggggggagaaaccgatacgcgtaaagaagtggtttataccgactggtcgcaggtagccagttttgcgcgggaaatcgcacatttaacgggcgattcgcgacttaaataagcgttaagtttgaaaagtgagcgaacgaaaagttttttgtattttgtgcttgtcacttcataaaaagaaaatgggcaaaccttggacaagtactcctgcaaaagtagatttacctaatagctaattttaaaatcactttgtctttataaaggacaaagtgattttttgttatacagaagtaaaatccctcgtctgaggaatcttggaaaaaacttggttcaattttgatataacatgtttttttcttgctaatttagtttttctatgtatcgctacacattctaaataataagatattagccggacggttgatgccaagctcaaaagtttatatggaagtcaaagcataaaaaagggtgttacaacgtgtagtcttctttttattttgccaacgtaacaagtgtgaaagtaatgatttgtaggatcagttaagaaaggtttaagattagatattgaaaaattttatatattttcaataaaatactggtactataataaatgtatacagattgtatggagatgtaattaattaaaaaggagttttttaattgcgttggagtaaatggttcaatgttttttgtatagtagcattgggatcaatatatggttataaattatttactaaccaagaagtcagtactactcgtttaataatagcttctgtaattgtgttgtggaatattgttggactttttagcaaagaatcagtaaaacaagcacagcaagcaaattaaaagtcataaagttgggaaagaaggatgttacttatgtagtatccttctttattattccttgaaaaatgaaacaaattggagattacagcttatataatcaattgaagtcgttgattattttcatgaacaggagatttaatgctttctgatgaaatattatcgtatgaatgttgcaagaggaaacgttactcaaagattacagggatgtgatgaacactcctctttatcgcactcacctgaccccaaattgttggggaagggcaggtacggaagatagagtattttttcttcgtaacaaatcgaaaaggttggataataaaaaacttataatctaaggcggtatatagttgtgaaaaaggcgttatttcttatattagaccagtatgcagattgggaaggtgtttacttagcatctgcattaaatcaaagagaagattggtcggttcacactgtttctttagaccctattgtaagctcaataggtggttttaaaacatctgtcgattacataatagggttagaacctgcaaattttaatttgctagttatgattggcggggattcctggagtaatgacaataaaaaactattacattttgtaaaaactgcatttcaaaaaaacattccaatagcagcgatatgcggtgcagtggattttttggcgaagaatggtttgctgaataatcatagccatacaggtaattttgtttacttatggaaagattacaaacaatataaaccgattagcagttttgtagagaaacaagcagtaagagataaaaatttggttactgctaatggaactgcccctattgaatttactaatttaattttagagatgattgattttgatactcctgagaacatagagaaaatgatgtatatgaatcgttatggtttttatcatttttgtgataaatatggaaatccatttgttgattaatttgctggaaatgattttcccgaatagggggctttgcgattgagttgaatttcctaataaagcaaagaaagatgatttgaggtcaagtttaacaaataatgccatcaatattaatttgcagttatttccgattcctgatataataaagaagaattatttttgttcggtgtaaaggatagtatgaagattgacttttcgtcttgatgatactttgggcaaggatagtatatactgtgtggttacacactaggaggcaacaaaaatggaacaaggtacagttaaatggtttaatgcagaaaaaggttttggctttatcgaacgcgaaaatggagacgatgtattcgtacacttttctgcaatccaaagtgacggattcaaatctttagacgaaggtcaaaaagtatcgtttgacgttgagcaaggtgctcgtggagctcaagctgctaacgttcaaaaagcttaatcttcaatcgtttatacaaacaggctctttatatagggcctgtttttttatgtctatatcatactcaataaaaaaccctactcaacgttcgagtagggagatgctacaaggtaatagaaaaagatttaaaacttcaaaggtttgtttacagtataacatactggattgacaatatgcggaatgtatataaattatttaatgttttgttcaaatatagataactgactctttttttcactaacctgttcgttcatttaagtaagattagatgaattataaaaatggtttcatctaaatgttatcaactcgcatatctcttttatgagaagaagataaacaattattattcaatgttgcagtggatataagaaattcttaaaaataatgaggagatcgattgtttttttctcctggaaataatcacttagagatacctaaaacaatgaaagccctacctctcttccatccttacggctccttgtccgtgccagtgtgaatcaggatactaaaaaaagtgactattttattgagttttttggtaaaacttcaatcttcgcagaagaaatgtaaataataaaaatggattagaatgtaggaataacaaaagaggtcgttaatgttctaaacataagttggagaagatttgcttttcatcataatattccgaaatatcttttgggatgtatctaaccaaaactttttatttgtttttcagtgattcctttaattacttccagttcactaatcaaaaattcatatgcattatccagcatttttttttcgcttgcattaagtgctttttctttcttcatacgcattaaatcacgtacaacttcagcaccttcttgtatttcacctgtttttattttgtccgtgtttattttgtacctttgcttccatggcagtaacctatcggattctccatgctgaaaaatgtgcataatgtgttttaatgcaagtatatcggtaactggtcgtatattcgaactcaatattttactcgttggaatcataactgtcatattactgattgacattcttatgacataatactgttgtttttcctctaagaattctttttcttctatggcttcaattatacctgctccgtgcattggataaacaatgttatcgccaatttgaaacatatcatccacctccatatatggtatccttcttaagattaccatatatggaggtgtaatatcaaaattttaataataacatgatcgaatttttgatgtcaataacttttttgaaaaaacagatcaagcaaaaacaatagggaacgtgtcggatttccaatcaggaaaaggtcaattgatccgtgtgagcagtttttcattggctcaatgacattacagaaatgatttgagtagataagaaagaacgatattcgtgaaatgtcagctaaaaatatttaaagcacatgattaagttctaatttctttaccgatttgatatggataacggccgacttacttaatgatgcattttcacttatcttgcaagcagaaaaaggtttgttgataaacatttagccaccaaattggcattattatcagggaaattgacaaccttcaaatgggtattgaggcgagaagaaaaataaagaaaggagagattataaatgaagaccagaacataaagaagtaaaggggaaagaacaaggttaattgaaaagcaaactatataaaatagtttgcttttttttgttatgacttcacttctttttctttctctttaatgactaataaaacaccgctcagaattaaaaacgaacctatccaaaatgtcccgcctatttgttctccaagcagaatccatccgagtaaggttccaaccagaggctgaaaaaagaaaaagaggcctccacttgaggcatttaataattgtaagccgtggttccacaataaaaatgcacaagctgttgaaacaattcccaaatacaaaaggccacctagaattttagggtcaagcagtagtggcgtaaaaatcgtgctaggggagtaccattaacagggactccatttattaatagaataaactttatgaattcatttttttgtatgataatggcgtcatattcatcgcttgttgaaatttacttatgaaataactggtactgttaaatccaacttgataagacacttctgtcacattggattcagggtgttgcagtaataataagcttttttgaattctataatccattacataacgtaatggcgtcttattcagcattcgtttaaaataacggcagcattcagaacggctcagttggccagcttttgcaatgtcctctaatgtgattttttcaacataatggagatggatccagtttaacatttgtttcattcgatgactttttatcatttcagattgatcgtactctaattgaaaaccattaacgaccaggtttttccacattaacgttaattgcatcgtaatgtcaatctcatagagcgatgtcttttgttgaatcaattgatttatttttttaacagcatctagaatattttttgcccactgttgatttccagccaaaaataaatagggcaaattggttgaaaacatatagggctgaacatagcttgaatacagttcctgagataaaacgaaatggggtgacacattcaagcaaatatacgtacaatccgagccttccttttcttcggccatgtgcaggtagccgctattgataaataatccatccccttcgtgaacctctattttttcttcatttatttgaaagagagctatcccttttagtatcaaaacaaattggatttcatcatgccaatgaagcggaatatagccatttatattttgattgatcgttgtcttgtagcaggcaactggcaattctaccgttcggtgctctgttaattcttttaaattttgatcgatcacaaaattcttcattctgacttcacacctcaatatatttatattttttcattcaatttgagtattttttatcatgttttgcatttattataacactattattatatttattagtgaggagtcatgtatgaatacttccaatagaagaatgggattgttctatgttatcacaggggcgacatgttgggggattggaggcacagtagccaaaaaactttttcaagaatatcaaattgatgtcaattggcttgtaacgacacgcttgcttacggctggaatgttacttttaatgctgcaactgttcagaaaggatcgttcccaggttattgaggtgtggaaacacaaagcgtcggctggccagcttctaatttttggcctattgggaatgctagctgtgcagtacacatatatggcatccattcaacatgggaatgctgccgttgctacgttattgcaatatttatccccagtaatcgtcattatctacacgctgttgcgaaaacaaacggttcttaccaaacaagatatcataactgttgtacttgctttagtgggttgcttttttttgttaacaaatggttcaatgtctcaactttcagtgccggcagctgcagtagtatggggagttttatcaggattcgcggcagctttttatactttgtatgccgttggtttattaaataaatttgattctcttgtcgttgtaggttgggctatgattattggcggttttgcattgggttttatccatccgccatggcaactggattttcaacgattaactgctgaggcgtatgcatatatcttattcgtgatattatttggaacaatgattgcgttctggttcttcataaaaagcttggaaagcctctctccaaaagaaacaagcctactaggcagtctagagcctctatcagctgttgtaacaactgtcgtttggttaaaagcgccatttggttcttttcaatggattggtgctatttgtattatagggataactttaatattggctttacataaagagccttctatggagagtgaaaaatcgatattaaagattaggaatcatgcaaatcgggatatataggggctttttttgcttacatgaccggtccggcaatgaaaaacactggtggagtttgagccctctcggcagtatcaaaaataccaagggttttgacgccctaggtattttttcttcaagaaccttcaatttttcttctctgattgaaaaacgtattacttttttgtgattggtatccaaatttcacttttaaaagatggtgatgttacatccttatgctcgttccacaatatttctggaccttctatttgttcgtaatttgacgatggaaaccattcggaataaatgcgtccccatacttcttgcagtgtatccggaaatggcccgattgattcgaatacagcccatgttgaggcaggaacttcaagccgtgagaagttatctggacaccgtttcgttgtggctgcgccaatatagtgatcgagctctccgttttcctctgtccgaccttcagaaaaattcgtggatgcactaatgaggcctgatggtgctacattagatagctcttttagtttatttattgctttttcatctaaactttcccacatagatgcaatttccggattaattcctttgaaaataataggaactctttttttaatgccaacgatgcgaaatgcctctttttcttcaatacggtagttcatttcatttcctcctttaattgttagctggaaggtcattcgtggataagctttaagggaatggccattaaatctggcttttgatgggtttatgccatgtaaattttggaatgcccgtgcaaaagaatctggtgagttataaccgtactttattgcaatatcaatcacttttacattgctgtctttcagttcaaaagctgcaagagtaagacgtctgcgacgaatatattccgataatgaaatacctgcaaggaaggaaaacatccttttaaaatgatattcagagcagaaagcaagctttgctgcctcttgaaaatcaatatcattagtgaggttttcttcaatatactttaacgccctattcatacttttaagcaaatccatttatttggcctcctttaaccaaagaataacaggagtgaaatgtatttatccgacattctgtgcacagttttgcaggatgacttatatgaaataaagtaagtgattcacttgtatttgtacaggttttattgaagcatgctgttcataaaaaggcatcaataaaagaaagttataattgtcttataaacggcacattcatataattgagtgaaaaaggatgcgtatcatgcctatcaattcttttgaaaattatccgatgagctggaagccatcgattgataaagctgaaaagcctatttataaagcacttgcagggcaattggaacaggatattttaaacggagttttattacctggaacaaaacttcctccacagcgagaattggccgattatctagatttaaatgtgagtacgatttcaaaagcatttaaagtgtgtgagttaaaagggctgctgagtgcgactgtagggagcggcacatttgtatcgtatgatgcgttgtcgaatgcgtatttacttgaggatactaagccgacacatttaattgaaatgggagcaatacttccagatcacgcttcatatgagcccttgttataccaactgaaaaacatggttcatgaggaggattatgaaaaatggtttagctatggccgggcaggtgaaagcctttggcaaaaagatgcagctgtaaagctcatccaaagaggcggatttgaaacatccgttgatcacattttatttgcaaatggagggcaaaatgcgattgcagcgacattggcgagtctttgtaagcctggagatcgcatcggagttgaccatcatacgtaccctggattaaaaactgttgcatcattgcttagtgtgcaaatcgtaccgataaaatcagaaaacgatgaaatgagtccggagtcacttgaatatgcgtgtaaaaacgaaaatattaaaggtttgtatttaatcccggattatcataatccgacgacttcctttatgtctgttgagaatcgaagaatggttgcagacattgtaaagaaatataatctgtttgttattgaggatgcatcgtaccatcttctcaacaaaaatccgcttccggcactcgcctcattcgcaccgcaacaggttattcatattgcaagtttatcaaaatcgttagcgccaggcctgcgtttggcttatgtagcagtgccgagacaatataaggagccaatatcaaaggcgctttataatttaaatataactgtttccccgctattagctgaacttactgctcgcacgattgtatcaaatcaatttgaagtcttaattgagagtcatcgtgaacaaaccattcgcagaaatcaactcgtaaaccgatatgttgcgggatatacatgtttaggtgttgaaacaggcatttttcgttggttgttgttaccgggtaaaatgtctggtgccgaatttgaagaattggctgctcgacttggcgtgcaagtgtatgcggctgaacgctttgtagtgggaaatagttgtcctgaaagggctgtaagggtttctgtctgtgcaccaaaaacacttgaagagcttgaacaaggattaatgatcctgagacgtttgctagacgatcttacctaatattgtttgccatacaattatgacattgtatggcttttttgtgcgtgttatgatgatccacatctagagggaggtttatacaaaattggcttttagaaaggaaggtcagatgatgttagacaaggacagcgtaaaagcaatagatgttcaaactgcttcattacagagctacatcagttcaccagaaaaacaaaaatcgttatacaagcgtacactattcgttgtgagtatctcacaaatttttggcggtgcggggctggcggcaggagtgactgtcggtgcgcttattgcacagcaaatgcttggcactgatgcgtttgctggtttgccttctgctttatttactttagggtcagcaggatctgcattaattgttggaagactttctcaacgttatggccgtcgaacaggtctttcagctggctttatgattggcggacttggagcaataggcgttattatggcagcaatcataaatagtattttcttgttatttatttcgttgcttatttacggtgcaggtacagccactaatttacaggcccgttatgcaggtacagacttagcaaatcataagcagcgagcgactgctgttagtataaccatggtttttactacatttggcgcagtggcaggtccaagcttagtgaatgtgatgggggatttcgctctttctattggtgttccatcacttgctggccctttcattttagccgcagcagcatatatgttagcaggtgtggtccttttcattatgcttcgtccagatccattagttatagcaagaacaatagaagcggcaaatgaagagcctggtgataaaggacatttggcggcaactgagcatacagaaaacaaaaaagggataatcgttggggcaacggttatggttcttacccaaatagtaatggtagctattatgacaatgacaccggttcatatgagacatcatgggcatgacttgggtgcagtcggtcttgttattggttttcatataggtgctatgtatctcccttcacttgttacaggtgttcttgtagataggttgggacgtaccgcaatggctatttcctctggaacaacgttgcttttggcaggtgtaatagcagcatttgctccgggagaatctatgattcttctcgtcattgctctttctttactgggattagggtggaattttggtttgataagcgggactgcccttattgtagattcaactgatactgccacacgagctaaaacgcaggggacagtggatgttctgattgcgttgtcaggagctgctggcggagcattatctggaatgattgtggcaggttcaagttacctcgcattatcacttattggagggattttgtccttattactcattccggtggtggtatggtctaggggccgctaaagggtaggattgtttaatttacattaatttgttatattgttagataaagtatattgcagcatctaatattctaacgaactatagttgctccattaaatctattataaagatttgaccaggattccttatagctgtgtcactcactgcatattctttaattgaatcacataaaatggttatcggatttgaaaaaggcaggattactcgctttaggtaaaggagtcataacgttgttaaaaaggttttctcttgttattgttacactaatgatgtctatcgttgttgttttagcggctgctaaagagtcgcctggagatcatgtcatctcatttgatgaacctattatcttgatgatctcaattggaatcgttgtatttttattgatccctccattagtcatgtccttttttggcaatttggttgtaagaataatatctggtgtataccaatgttttatcgttttcacttttctggggctcattccaattggatttcttattcccaatggctttttgacaattctagtttctattgcaggaactttagtcagtatagctagtgttgccgtaaccttatgcattggcaagaataaaaaagatatataatcatcgaattgttattttttcagattgtcagtgaaataattatacaaaaagagaaggcttgtgggccttctttttttgttgttgcatcatccccactttgagcttaatctattgaataataagagaaggaacctatagaagaataaaataaataccgagatgtcaaaaataaaactggacttcattattgtgaattcacgtaaatgtaaaaagattggaaagaggggaattccttcatgacaaatagcagaacaaatccgaaggttgatgaatttttaagtaaagcgaaaaagtggaaggaagaatttgagaagttgagaaccatcattcttgactgtgagctgactgaagattttaagtggatgcatccttgttacacatatcataataaaaatattgttttaatacatgggtttaaagaatattgcgcgcttctgttccacaaaggcgtcttattacaggatacagatggaattctcattcaacaaacggagaatgtacaggcggcgcgccagattcggtttacaaatgttcaggaaataaatgagctagaaaacattttgaaagcctatattcacgaagccattgaagttgaaaaagccggtttgaaagtggatgttaacaaaaatattgaattgaacattcctgaagaacttcaaaataaattcgatgaaatccctgcattgaaaattgcttttgaagctttgaccccgggacggcaaagagcgtacactctttatttttctcaagccaaacaatccaaaacccgagaatcgagagtcgaaaaatatgtgcaaaaaattctcgatggaaagggattaaaggattaggcacgccaaggttcaggctaaaggaatagcatcatagcgtaataagatcatttctatagaagaaaaacaagcatagtaagatgcttgttttttcttaggacaacattcacttactgctgaaatgcttctaacattgtatgccactagacagcgttataaaatattaatgcaacacctagaaatctatccaatgaaatagctcaatggtatggctcattacatttagaatgcctaggagaactaatagaaccggaagatttttagcaagttactacactccaaactttgtttttgtattaatataccttattaaccattgtttttagtcaggtgcagacaaacgaatactgattaatgaatcatcatgatatcaatgagccgcttgattttttcatcgtcgcctgtatcaacgtacactgtttttctgttttttatgatactctcagtcacttcccgcatgacgcctttttctatatcatcagcggaatcccagcgtaaaggcacattatatacatgaattgtgccatccccattgccatgataagtgactgatccatccactaaacgagaacctgccaactgggtcacattttctggatagctggcacttgtatcatcattaggattaattggctcgccagccgcaatatgtcgaacatttaattcatctatctcttgattaggtccaagttgaagccaaactctggcatattcaattttttccgaagagtatgctgccaatacattgtcttctttgcttttctcttctgctgaagaggtatcatttgcagcttttgttgcggattcttctgattctgttattggctccgcttcatccttgcgtattttggtgctctcttcaggctcagtgtgtttttcgtcagtttgcacagcagaagcttgatttgaaggttgttgtgcttctccatccttactgtccgtacatccagcaagcaaaatcataagcagcagggcagtattgcaataacatatctttctgcgtttcttcattttttcattcctctctattaattcaggtcagcttcatatataagtttatgtatctaaatattaccatggaatagataggatgatattgaaaactgtttaagaagaggaaacgatcttgaatagcatcgcgaaaacctaagaatcttaagaagttttgcccctttttcttcaggtattgaatgtaaagtgggatataaatgcaaacaaaaacgaaatgccttatccacctcgtgtcatggcagaaaaagtgggggatttattagagcggatttgataatggcggcaggtaaatgggtgttgacttatatgtctaagcgggagactcaagtctgctcgatcgcatacaaaataccaagggccagcaacccttggtatttttataccttcatgcatttttgaagtttatgcttaaaggtctgccttactttgcaaatcgccgagctgctgcaacgcacatgataacggcgatattcactgctacgagtgcccagcccactttctcgtgcagaatcactgaggcaagcagcagtccaaaaaaaggctggagaagctggagctgcccaaccgctgcaattcccccttgggcaagacctcgataccagaacacgaagccaatcagcatgctgaataaggatacatatgcaagactgagcagtgcgggaacgccgatcgccgaccatgagtccggcgtaaaaaagaacgacaatggcagcataagaggaagcgacagaacgagtgcccatgagatcacctgccaattccccagacgccgtgaaagtttggccccttctgcataaccaagaccgcatacgacaatagaagccagcatgtacgcgtcgccaagcggggatgaacctcccccctgaatgagggcgaaacctgctactaacaagctgccggcagctgagaaaatccagaagacggggcgagggcgttcacccccgcgcagtacgccgaagactgccgttgcgagtggaagaagtccaatgaagacaatggcgtgtgcggatgtgacatgctgaagcgctaaagctgtcagcaacgggaaaccaatcactacgccgaacgctaccactaacaatgaaatgagatctcttttggcaggatgctgctgccggaagatgagaaggagacctcccgccagtacaccagctatcgcagcacggcaaactgtgagaaataacggatcgaagtctgacacagccaaacgggtcgcaggcagcgagccgctgaaaatgagtacgcctataaaaccatttatccagccatttgttgttttgttcattataatcactccacatatctttcttgttcattgtctgtattttcttaacaaaaccagcagctaaggattacaatgactataaactggaattggccttttataaacagccagttttcataaaaaaatgcataccagttaggagaacaacgcgcaaatggatatcacgccttttttgaatagaactctggatattccgctttatcagcagctttatcggtattttaaagaaaatatgcatcggggccgtattcaaaaaggaatgaagcttccttcaaaaagactcctggcgaatcagctttccatcagccaaacgactgtagaacgtgcctatgaacagctcgctgctgaaggttatattgtgagcaagccaagaagcgggtggtttgctgattatcatgattctgattttgcttatgatagaatgccaagcacaacacccattcaacaagaagcagaagaaaataaacaatggattgattttcattatgggaatgtagattcttcttacttccctttttccgcatggcgaaaaagcatggtcaatagcttagaccaatatggacacgagctttatcggccgggacatgttttaggagagtttgagctgagaacactcattgcagagtacctgtatcaatctcggggggttcattgcggccctgaacaagtgattataggtgccgggaaccctattctgctgcaaatcttgtgccaagtttttgagccgaatatttctatagggtatgaggatcctggttatccaagagcacgcaagatttttgaagccaaccgcatgaatattgttcctataccagtcgatgatgagggaatctgtatacagaagatcaaagaacagcagccaaaccttgtatatgtcacaccttcccatcaatttacgctgggaaccataatgacaataaacagaagaattcagctgctcaaatgggcggccgaaaatcaatcctttatcatagaggatgattatgacggggaatttaggtacacaggacagccggttccttctctgcaagggcttgatcagcataaccgtgtcatttatatgggcactttttctaagtctcttttgccctcgctgcgtatcagctatatgattcttccttcgcctcttttaaaaaagggtcatgaaatcacgtccttatataagcagacagtgtcctgccacagtcagctaaccctagctgaatttataaaaaatggagagtggcaaaaacacatcaacagaatgagaaaactttaccgcaaaaaaagagccattgtattagaggcagtgcaaagggaattaggagagcatgtcagaatccgcggagaaaactctgggcttcgtatcttacttgacgtttatttgccatttggtgaaaaagagttaattgagaaggcgaaaaaacatggagtaaaaatttatcctgtttctctttcttatcaacatcatcctcctacaaaaacggtctcgctcgggtttgcaggggtttctgaatccgacataagagaaggcataaaaaaactgaaggctgcctggaagatatgagggagctttcagtttagcaaaacggccaagtgacgactaagtgttgagagctgttcaatattttttaagtatatgatgagtgcctgcagtccaggccacgatacgtctgtttagcgaaaaacagaattttttatttgctcctcacagtgctaaaataaacaaaatagacaattgaaaaaatagaggtgtaagaatgaagttagatgagtttacaattggccaggtcttcaaaacgaaatcattaaaagtatcaaaagatgatattatgcggtttgcgggtgaatttgaccctcagtatatgcatgtagatgaagaaaaagcgagtaaaggcagatttaatggaattatcgcttccggcatacaaacactggccatatcttttaaactttggattgaagaaggtttctatggagacgatattatagccggaacagagatgaatcatatgacattcataaaacccgtatatccggatgatgaattgtttacaattgttgaggttcttgataagcagccaaagagaaatgaattgggaatactcacagtattgctatctacttataatcaaaaagaagtaaaagtgtttgaaggtgagttatctgtattgatcaaacgataactcagaaagcccgcttttcgcgggctcgattgaagcagatgggtgaaagatgttagcgggtttcctttgaaaaataagaggttaaaacatcataaacaataggcaaagaagtaaatccctcatcttctagaaaatgacctccgtgctgaacttcatataacgcagcatcaatttgttgtgccagatccttgctgaatgaaaaaggcacaatttggtcgtccttagaagcaatgacagcacggtgcttcgcggactcgatgattttttgatgatcaaacgatccctgtgtaaattcatctaacatctgtaaagtgggcaatgatttggcaaagccggaaacaagtatgattccgccaagctgttttcgtaattgaagatgttccaaaaatctcaaaatggcggggcaacctaagctgtgcgcaaccaaatacgtattttcatgtaaagtgtgctgatataaagagagtgtatccagccaatcctcaagtcttggctggagcggattaggcatgtttaaaatgtctgcttggaccccatctgcgagcagacgttttttcagccaagggaaccaatgatttgttgaggaggctctgtagccatgaatgatatagacttgttttgtcattatttcctcctaagaaatattttcattcagtataaaattcctctcattgggaaacaagtacgcacttttttgtaagtagctttacatatgaggccctccttgtgccattccccacttacacatctcatctatgaggggatacaaagatcgccctctgtcagataacgaatactctactttcagtggggtgtgagaaacctcagaccgatgaataaggccgtcagtttgcaattccttaagctgtgcgcttaacattttatgggtgatgaagggcatagcccttttcagctcgccgtatctcatcgttttttcacaccctaactcatagagaattctcattttccatttgccccctataagagataaggtgtattcaaatggggcttgtttactgcggcacaggctattcattgtaatcaaacctccttttttaagtatcatatcagaataaattaggattttcggtgttgaagtttgagggcgattcacgatctgaagtgaaaggggccgcttgctcaacaggcggcacggtacatgaatgttctaagtcaaagagggttaccttactgttagttactttatttaaaaaaacgcatgtttttagctgaaaatatctattatggtatatttaaatataaagaaatatttgagaaatgaggaatggtatgaatacacccaaaaaacataagaaatttaaagcgaaaatgattctccaaatcatcatggttatcattggaggaatcatagcggcatatggactagaaacagtgctcattccaaacagtgtatctgatggaggggtgacgggtcttagcatcgttggttcacagctattcaacttgccgctggggattttgattgctgtgatcaacattccatttgtctggttaggatataagcaaattgggaaaagctttgcattattatcaattatcggaatcgtatcgcttgccgcggggacaagctttttccaccacacacccgctatcatagaaggagataccctgttaattaccgttgtcggcgggattatccttggattcggaatggggctggcgctgcgtaatggcggcgcattagatggaattgacatgcttgctgtgctgctatcccgaaaactgccattcggaacgagcgatctcattctattcttaaacctatttgtgtttatttttgtttccacagtatttggcttacaaggggcattgctttcagtcattgcttactacattgcatccaaagtgattcatgttgtggaggaaggcttaagcggctctaaaacctttcaaattattacaacccaacctgaattaatggtagagacaatacgtgatcaattaggccgaagcgccacatataaagaagcttacgggggtttttcccacgagaaatttaaagaaatcacatgtgtcatcaaccgtttagaagaaaccaaactaaaggaaattattaatgatattgataaaactgcctttgttaccgtgtatgatgtagctgaagtgaagggcagcaattttagaaatcttaatcatcactaaaaaatagaatgacctttttaaccgtaactgacatgccgcgggtaatttaatcaaaaacacttttttgaggcttgtgggtgaataaccggtgaaggtctgaatcacagaaataccaagggcgtcaaaacccttggtattttttctggttattagattttatcttcagctttacgtgctgcttcgagcttatcaatcctgtctttatatttttctccccagtccttcatgtgcaggataacaggttctaatgttcttccaaactcagttaaagagtattcgacttttggagggacctgtttataaacctcgcggtgaatcacgccatcccgttccaattctcttaattgtagcgtgagcatacgctgggtaatttttgggtatagttttcgaaactcattaaacctctttttaccgtcaatgagatgataaagaagaatgcctttccacttacctccgatgatatctaatgttgtctccaccggacatccttcaaagtcatcagaagaataatcaatgccgagtttacgatttctcaagctgttcactcctaatagtatactttttgatactatatacattcaatgtgcgtactttttatattttaatatacatcatataatgatgtcacatctaaggaatgaaaggaatggatcatatgaaaacactcgtactcgttgtacatccgaatatagaatcctctcgtatcaataaaaagtggaaagaagccgttttaagtgaaccagatgtaactgtccatgatctttatgaaaaatatcgcgatcaaccaattgatgtggaatttgaacaacagcagctcctggcccatgaccgtatcgtttttcagtttccattatactggtacagcagcccaccgcttttaaaacagtggtttgatgaagtgtttacgtttggctgggctcatggtcccggcggaaataaattgaaggggaaagagtgggtaactgccatgtccatcggttcacctgaacactcttatcaagccggcggatataacttgttttcgataagcgagctgacaaaaccgttccaagcatctgcccatttagtaggcatgacctatctgccttcctttgccgaatatcgcgccaatacaatcagtgaccaagaaattgccgaaagtgcgaatcggtatgtaaagcatattacaaatatagaattaaacccgaaggttcgcctgcaaaggtatttgaaacagctggagagtgtcgatttaacataaagattgatttttgaaaatcctgtactcaccaagcaggattttttcttgttcagcagagggattttaacatatagcaaaaaaagaagaagccaccaaaaataagctatttgcttggtcctgactgcttatttttggtgaaatacttatttctctgtgatgaaataaagcaaagcgatgaccggaaaagcgattccaatccataatgctgtactccatccgcctgaggcatatgcccatcctccaattgatgaccctatcgcaccgcctagaaagaagatcgccatgaataatccgtttaatcgactgcgaatttcaggcgccaacgaaaaaatagcacgttgactgagcacaaggtttgcagatacacccatatctaacagaatagcagcggccactagaactgttataccgacgggggagctgctctgaatcatgagcggcagtaataaagagacaacgacaacaccgagagcgattccagtggcaagcctggttaagcctcgatcagccaggcggccgcctattggtgcagtgactgcacccgcaatgcccaccaatgcgtagagtgctattgccttctgagaaaaatgaaaatcaggaccggacaataataaaggaacagttgtccagaacaagctgaaagctccaaatacaaacgcatgatagatggcacggcggcgtaagactggagtcgtgcgcagcagcttccacattgaaccgagtaaggcagtatagtttgtatttgctgttggttttctggcaggaagcacttttgataatacgatggccaggataacacttaccacggcggacaaagcgaatattgcattccacccccagatatcagcgactagactagatatcggacgggaaagcataataccgagtaataagccgctcatgacattgccaacaacccggccgcgtgcagcgtctgatgcaaggtatgatgcaaatggaacaagcacttgggctgcgattgatcccaatccgacgaaaaacgcagctgctaaaaacagtgttccatgcttcacaaatgctgttagtgtcaaagccgctgcgcttagaaggagcgatacaacaataagttttttgttttcgataatatctcctaaagggacaaggaatagtaagccggcaacgtatccgatttgggtgagtgtgacaatcaatccagcaccgcttggagaaagtccaattgccttactaattaatccgaccaagggttgtgcatagtaaagattagcaacaatgataccgcatgcagttgcgagaagaagggttaaactgggtgaaatcctctgacctgcttgtttgtttccattagccatatgaatgaactcctttttaagtggttttttgagtgtaatcatgacttctcacaagtgattttataaactgaacgttcagtttcgtcgattaataaaaataatatactaaacgttcagttttgtaaatggatttctgttttctttttttattcaatttaagtatactgaacgtatagtttatattgcgggaaggaatgatttatgtgcagagtaaacgagggcggccgcgtgatgaaggaacgcataaggcgattctctctgcagcctatgacctattgctggaaaaaggcttcgatgcggtgacagtcgataaaattgccgagcgtgcgaaagtgagtaaagcaacgatttataaatggtggtctaacaaggctgccgttatcatggacagctttctttcgaccgcgacggacaggctgcctgtgcctgatacagggtcgtcagtacaagatatagtaacccacgccacgaatttagctaggtttttgacaagccgggaaggaaccgttattaaggaattaataggtgcagggcagttggatgaaaaattggcagaagaatatcgcacgcgatttttccagcctcgccgcctccaagcgaaaggccttctagaaaagggaattcagaaaggtgaattgagagagaatcttgatattgaagtaagcatagatctcatttacggaccaattttctatcgtctgcttataacaggggatgaggtgaatgattcctatgtgcgtgatttggtgatgaatgcgtttaagggagttcaagctacctctgctacagagagtatgtagctgataagaactgcaaaagctgcggattatatgacaaattggttccatcgtacagtgaaatataagatttttgttgctgagcggaatcatcgagggaaaagttctcttatcggatgtcgaaaaagaagtcattcaatcgtgaatacataacatcatattattacattccttttcatcgattggaacaagggttctatacttcaatggaataccgcaaagttggagtatttaaacaacaggggaaaatcgatggccattatgtaggtgtcatggcaatggaaaaaatacttgcaatgtaaacaggcctctaaagagacctgttttttaatatccagatgattgtctagtttcagcttgggctctatgaccactcccataactgaaatagtctaatatttataccagaagggattgtttatataaataaaagtttatataatgacgggggcgctaaggaaacgcggggagcgactcaggttttcgtttcaaagttttgatccttaagatatacggagcgctacatatggaaacgtaaaggggaatgtataatcatttggcgtgtatataacgatttgcttatatattgatttgggaaggaggagctcatatgacgattgatgttgcggcgatgactcgttgtttgaaaacacttagtgatcaaactaggcttatcatgatgagattatttcttgaacaagaatattgtgtctgtcaattggttgatatgttcgaaatgagccagcccgccataagccagcatttgcggaaattaaaaaacgcaggttttgtgaatgaggacagaagaggccaatggcgttattattcaataaatggttcctgtcctgagtttgatacattgcaattgatcttacatcaaattgatcaagaggatgaattgttaaaccatatcaaacaaaagaaaactcaagcgtgttgccagtaaggaggcattagattgacatcaatgattttggcagtattcatctttttattaactctagtattggtcatatggcagccgaaaaatttatctatagggtggtcagcctgtggaggcgcagttttagctctaatagcaggtgttgtcaattttcatgatgtgttaactgtgacagggattgtttggaatgcgaccttggcttttgtggccatcatactgatatcgttaattcttgataatatcggtttctttgaatgggcagcgcttcatatggctaaggctgcaaaaggatacggtgtgcggatgttcgtttatgtatctctattaggagctatcgtcgccgcgttatttgcaaatgacggtgcagctcttatattgacaccaatcgtattagcgatggtcagagcattacattttaatgaaaaattagtttttccttttatcattgccagcggatttattgcggataccacttcgcttccttttgtagtaagcaatttggtcaacattgtttcagcggactattttcatattacgtttattgattatgcatccagaatggttgtcccgtacctgttttcgctgctggcgagcatcattgtactttaccttttctttagaaaaagcataccaaaacgctatgatctgactgaggttaaaaaacctgttgaagcaattaaagatcaaaacatgttcagactgtcatggtatatcttagggctgctgttaattggatattttgcaagtgaatttttttctatccctgtatcagtggtagcgggcagcattgcaatcattttcttaatcgctgcgcaaaagagtccggccgtccatacaaagaaagtggtgaaagaggcgccatgggctatcgtattcttttcaattggcatgtacgttgttgtgtatggtgtccgaaatgccggattaacggatgtcctttcagatgtgattcaagccgcagctgatcaaggattgtttgctgggacaattggaatgggctttattgcggcgattctttcttccattatgaataacttgccgactgttatgattgacgcattggccattgccggtacagatacacatgggatgatgagagaagcgcttatttatgcaaatgtgatcggttcagatttagggcctaaaataacaccgattggttccttagcgacattattatggcttcatgttctttcgcacaaaggtatgaagatttcctggggcacgtattttaaaacaggaattatcctcacgatacccactttattgatcacacttgtcggcctgtatatttggctgctgataatccattcttgtttctaaaaggacaaggtcactatatcaaggaaaacaatgcactggtaactcttgccgcagccaaatggctgaagggtgggggagaaaataccttggggctaagtggaatgtgtacagcgcaggaatcgaagctcaaggatgacatcgagtgctgtcaaagcaatgaaagaagcagggattgatatttcaaatcaaacatcggagaaatttgatgatccggcaaaagcacacggaacagaagaagtgtttccaaagggtccgtgatgaaattggtgaccgtttaaaacagtttgctgtaactggggaataaagaatcgatatattcagcgttttcttgggttatataatacaatgtgttgttcaacaggtgtctgcgagctgagtgcagacacctgtttttgtttttatttgtctgagattcgtaacagggaagttatttagctggtgacagaggaaaattgatttgtgaacagaatcatgaaggagacggtgttttaaaggagttgtctgttttgcaggaattaacaaaaaaaaaatacagtagcttaaaaacaatgtttgatgacaaatattgtcccacatttgtctattcaatattagaccaaaccattccgggagctgtttatgcagatgatcaaacctttcctaaatcgttttttataggaactgaatcaggcatttattttattgcgggagaccaagggaatcgggattttcatgatttcattgcaggatattatgaagaacaagtgaaatcatcaaaacgatttaccttgttttcttccagtgatacatgggatagcgtactgaaacccatactgaaagatgacttaaaccaaatgagaagagctgcattttcttatcaaccaaaatctttcaaaaagactttgcaactgccaaaggggcttgtattgaaaagaattgacgaagacatcatttcacatagcacagcgtttaacagcgcgtattatgaggagtattggaattctgtctcacagtttgcttcaaaaggttttggatttgccgtattacatggcaatcacgtagtaagtgagtgtacctctatatttttagggcataatcgagcggaaatggatatctatacacttgaagaatatagaggactggggttagcttattgcgtagcaaataggtttatagcgttttgtatggaaaatgggattgttcctagctgggattgtgatatttgcaacaattcgtccattgcattagcagctaaactagggtttaagacggtaacggaatacactatttactactctggctaaccttaatgaaagaaccttaaaaggagataccaaccgatgttggtatcttttttgttttagagtttttttacccttttagcagaaaaatgggtgatgaaaatcttattcattttatttacttttaggtaggtaaaacataccccgccaactgtaaccactccgcctagcagagagagcagtgtgggtatctcgccgatccagagccaagatatgatcaaggctaaagccggtgtaacataaagtgaaagggttgcttctgaagcaccgacgaatgaagtgacatatgctagtgcgaagtaaggaataaccgtcggcaataatcctaagtaaacgatagacaaagttgcgcttattgaagcgttcatcatctcttcgcctaagcctggcagaaacacaagcataggtattgttccgccccaaatggtgaatgtaacgaatggaataaaaccatatttttttatatagcgggcttgaaaaacgaaataaatactctccgaaaatgctgccagcaggatgaccaagataccgctcattgaatatgtaaagtctcccgccccaaatgcaatcaataatacacccaataaactgatcatagagccaagccatttcgtaaatccaaaatgctctttataaaacaggcgggatagcatggctgagaagatcggtgccgtagtaacgagtaagcttgcaactccggcactaactgttttttcaccgatgttcagcaaaatgtgatagaatgcaaatcctaaaaaccctaaaagaaaaatggcaggaatgtctttcaagtcgggtaggcgcatctgagtcaaaacagcaaaaagcaataatgccatagagccgattaacaaacgaaataaagcaaggtgttctggcgtgtacccttcaagtcctgcgcgaattcccggaaaagcagatgcccataaaccaatcatgagactatgagatatcattatttgaactgttttctttcgcattcctctcactcctctttacaaaaaccaaccagttatttaatgtgtttctatactaataaagatttgatgatatggcttcaaccagttcaatagattttgacccaaccaatttattttaaggagaccgattctatgagctttccagaagaaaaaaagatgaaaaagctccctaagtacagacaaatcgttcattttattaaagagaaaataggaaatggagagtggccgattggaagcaagattccaagccagcgcacgcttgcaaaagattttcaggtaaatcggagcacagtgattacagcgttagaggaattgatggccgatgggctaatagaaggcacaatggggaaaggcacagttgttatcaacaacacatggacactgatggctaagaattctgctcccgattgggatcaatatgtcacctctggcattcagatgccaagccgaaaaatcgttcaagagataaatcaatcagaatcaaatacagaccttatacagctcagtaaaggtgaactttcagctgagatttttcctttggctgttatgaaagagatgatggggaaggtatctcaacacatggaggcattcggatatgaagaaccaaaaggttacttacctttgagggaggcattaagcaactatttaaaaaccattggaatcaacgtctcatcttcttccattctgattgtctcaggagcgttgcaagccttgcagctgatatcaatggggctgttacaaagaggatcaaccgtttatcttgatcagccctcctacctttattcattacacgtatttcaatcagctggtatgaagctgactggacttcctatggataatgaaggacttttgcctgaaaatgttcatttaacaagaggagagcggggaagggctatcttatatacaaatccatgttttcacaatccgactggtattcttatgtctaaaaagcgacgggaagaaatcctagcagtaagtgagaatacacagcttcctattattgaagatgacatttatcgtgagttatggatcgatgaaattccgccatatcctattaaaacaattgataaaaatggacacgtactgtacataggaagtttatcgaaaacattaagcccaggtttgaggattggatggatcgtcggaccggaaccggtgattgaacgtttatctgacattaaaatgcaaacagattacggatccagttcgctatcccagagagtagcggcagagtggtttacttccggccactaccagcagcatgtagaaaaggttaggcagcaattaaaggtgagaagagaattggccttgagtgctttagaaactcatttgaaagaagtggcgacatggaatatcccaaaaggagggttttttgtctggataaaaatattgccttccatatcaatgaaattactttatactaaagccttatcaaaagggattctgatcaatctcggcagtatctatgctcaggaaaaagggaattatattcgcttatcatatgcttatgcatctcttgaagaccttcaaaaggggatttatgagttgggtttaatgattaaagaattggcaagcaggtaacttttatatccttaaatggatgtttcactaaaaaagagatcaagcctaatgatcgcttgatctgataataacaagggttactagaatagaccaaatcatggttcggtcttaaaataatcatgtctctgaacgaaaagtctttccgacttctcttcctaaaccaaagtagtgtctgaaattatagataagcgggctccatttggaagggttgatatggttttcgtccagaatgatactttcctcggcatgaaaatgtagtgcctgcgtctctacaattgcgaatgacgattcatattctggaagccgaatgtgtttcacttcggcttcgatttggatagggcattctttaattcgtgttggtgatactgtttttgattgtaaaggcgttaaccctgctgcctcgtatttttcttttttatatgtaaatccgatctgcttctttaaaggcggtatactcttttttccgctataagatgaaattctttcaacgttttcccataaatccgggccaggcaagtttatgacacactctttgtgtctttccaaattgtcgatggcttttcctcccagtcctactccaaggattatataatgtccaagagcccaagaagaagacataggactaatattagtggttccatcctcattcaatgtggttagaagaaatgtcgaggtaccataatacatgatcttgggtttgatttccttaaatcgacgagtgtcttgttttttgatgtccaacgttttttcctccttgtcacgcttacatttatattgtaaaggattaacatttcaactatcatcgaaatatgaatgtaaggaggaaaatcatgaatcctaatattgcaaaaatctcttcgttgctatcagatccctcgcgttcttccattcttctcagtctgatggatggaaggatacaccctgcgggagagcttgcatatctcgctaacattaaacctcaaactgcaagttttcacctgaataaattgcttgaagcaaagctgattagcgtagagaagcatgggagacatcggtattacagattggctgactcagatgctgcaaatgtgatcgaacaattgcttcatattgcgcctaaagcaaaagtcaaatctttaaaagagtcaaaagagaaaaaggacttgcatttcgcccggacctgttatgatcatttggcaggttatgtgggcgtgcaaatggcacattcactagttgagcaggggatgttaaaaaaagttgatttaaactttgaggtgacttcagagggtgctttattcttttcgaagttaggcatcaatgaagagcaacaacggaataagaggagagcctttgcccgctgctgtttggattggagtgaacggcagcatcatattgcaggagcattaggaaacgccctattggtgcgcatgttagaagaagaatggatcgttcgtatgcctaaaacgagagcgattaggattacacaaagcgggaaaatcgcgtttgaaaagcacctaaacgtgaagatttaggattttgaagcggaaacatcagatgatgaggcacgatatctaggaggagtaagatttgttctaatcttactccttcttcttattttgaagcagctcgattccccattgcaatagagatgcggttccaactgtttatttgattaatgatcagaacaaggtcaacatattgttcctcatcataatgttcccgcacccgatgatatagctcatcaggaacccttttagatggaatgagcgtgatgtgttcagatagttcgagagccgctttctcttcaggtgagtaaaaatcacattcattccaagcatgtaaacagtaaattcgctgttcagtttctcccattttgcgggcatcggacgtatgcatatctatgcagaaggcacagccgttcatttgagagactctgattttgattagttctctcgtcgttcggttaattgaggattgtttcgtgtatttctccatatccatcatgattttcataccttcaggtgcaatctcatagtaggacactctttgactcataaagcaagactcctttccatagaatacctagattgtatcccggtattgatcattttaccaatgtgcggtttgaatgacagctgtttcagcgtcttttggaaagaagcttctttgaataaaaataagggtagccagcaatgatgagtggagctgctaatgcaagcagtatccatgagcctgattggctgtctctagtgactctaatgaatatataagtaccgatcagaaaatataataaagcacctagaaaccaatacatgttcattcctctttttccttgctttttggttgcgcatttttgtctgtcatatggcttaatcgatcagggttctgattttttaataccttttcggtccggattccttttctctttaatgataaaattgtgagatcaatcgatttcaatgatgatcattccttcaatgaatagtaagttccttatgattttaaaggtaaatttgaaaagataaaacgtacatagaggcagaacgttcatgtacgtttgggcaatgatcacttgttggaaactctaatgtttccctgcacctgatattgttgtgttccttctcttcctataaaatgattggatacatgtatgtttgcacgttgaaatatgggttcgattttcatgaatctctattcggtgaaacaggtaaaggaagtggataaggtttgcttataaggaatccttttaaagataaatattactcacatgataggcgggcattaaacatgcttgcactcagagtgccgggcctggcttttattctcatgatctatatagcctctatcgtgctgcaatttgtttctgggggctggtccattttattgctttatgcgtttaccatattaatcgccatttttgctttgcttcattggcactcatatcgctgggttaagaaaagagtgattctgtatttcgcggtacaaggtttgatcacctttgcacttgctaatctcatgactggcttctttatacttgtgattatcggcctttatgcatttttaattggacaaattataggaatggcagacagaagaaggacttttctcattctttatctattgctgctgctggtcataaattcggcgtatcaccttcataaaggtgaagttttgcattttattgttattgctgcgccgatcatgattgtcatcatcacttatgccgcaacattttttgcccaagtcgatgaaaaaataaaagctcaattgactcttgaaaggctggagctggctcatcagcaggtagaacagctgacgctgcagaacgaaagacagcggatggcccgagacttacacgatacgcttgctcaaggtcttgtcagtttaaatatgcagctggatgcgattcatgttcatctcgccaaaggcaacacagagagagcgaaggaaatcatacaacaatcgatgaaaagagtgaaaagcacaatagctgatgcacgttcagctattgacgatctccgcagcaaatcagaagaaatcggtgttttaaaagaaagaattacctcgctaatggatcattttatagagtcgacaggcatggcttgtttattagattacagattgcatcaggtgctggatgtgcgtacagctgaaaactgttattacatcattggagaatgcatgacgaatgcggcaaagcatgctgaggcgaaaacaatctggatatccatttgggatgatgaaaagggaaggctccatttaacagttaaggataacggcaagggatttgatgttgaaaaaggaaagaaaaagagaggacattatgggcttcttggcatacaagaacgcgtcagggcaataaatggccaattcaatatcaagagtacaaaattgaaaggaacacaaattgagatcactgtaccaattcagggagagatgcaagatgaataaggttttaatcgttgatgaccatcttgtcgtgagggaaggtctgaagcttttaattgaaacgaatgatcaatacaccattataggagaggcggaaaatggaaaagtagcagtccgtcttgcagatgaattagaaccggatatcattctgatggatttgtatatgccggagatgagcgggttagaggccattaaacaaataaaagaaaaacacgatacccccatcattattttgactacatataatgaagatcacttaatgatcgaagggattgaattaggagcgaaaggatatctgttaaaagatacgagttcagaaaccctttttcacacaatggatgcagccatcagaggaaatgtgctattgcagcctgatatccttaaacgtctgcaagaaatccaatttgagcggatgaaaaagcagcgcaatgagacgcagctgacagaaaaggaagtcattgttctaaaagcaattgctaaaggtcttaaaagcaaagcgattgcctttgatttgggcgtctctgagcgaacagtaaagtccagattaacgtccatttacaataaattaggcgcgaattcaagaactgaggcagtaacgattgccatgcaaaaaggtattctgacaatagacaactaaactgcatatttgaaaattgcccaaacgtacatgcccgaatgtacgtttttttcatttcattgtcaactacaatgagaaagaatgtgatcaagcaatgtgttgaaaggagattatcatgtcaaaaatgttatatacattaggaggatgggttgctcgcaatcgcataaaagcaatatgtgcgtggatcgttgtgttagttgctgcgataggccttgcagtgaccttgaaaccaagtttttctgaggatatgtccatacctgacacaccttcggaaaaagcgatggatgtgattcaaaaagaatttcctcatggtcctgataaagggagcatacgggttattttcggtgctggtgatggggagaaacttactgggaagccagcaaaaaaagcaatagaagatacgttcaaagaaatcagtaaagatgattctgttgactcgattgcaagtccttttgtgacagggacaatcgcgaaagatggcacagttgcctatgctgatatccagtataaatcatcagcagatgatataaaggattactctatcaaacacttaaaagacagtttgaaaatggctgatgatgaaggattgcaaactgagctaagcggagatgtaccgggagcggagatggagataggcggtgtctctgaaattgtcggcattatcttggcttttgtcgttttagccattacattcggttctttattaatagcaggtttgccgattttaactgcactgattggtttaggtgtaagtattggactggttttgattgggacacaagtatttgatattgcttctgtcagtctttcattagccggaatgattggccttgctgttggtattgattatgctttatttatttttacgaaacaccgccagtttttaggcgaaggcatacaaaagaatgaatcaattgcgagagccgtgggaacagcgggaagtgcagtggtttttgccggacttactgttatcgttgcactttgcggattaactgtcgttaacattccttttatgtctgcgatggggctgacagcagggcttagtgtactgatggctgttttggcttccatcacacttgtgcctgcggtcttatcgattgcagggaagcggatgattccgaaatcaaacaagaaaatagaaaaacaaagcactgaaacaaatgtctggggacgctttgtcaccaaaaatcctatcatgctaagtgtatgcagcattctgattttgatcgtcattagtatcccatctatgcatttggaactgggcttgcctgatgctgggatgaaagctaaggataatccggatcgccgggcatatgacttgcttgccgaaggctttggagaaggatttaatggccaattaacaatcgtagcggatgccacaaatgctacagaaaataaggcggaggctttcgcagatgcagtgaaagaaataaagggcttagaccatgtagcaagtgtcactcctgcaatgcctaataaagaagggaactttgccatcattacggtcgttcctgaaacaggtccaaatgatgtcacaacgaaagatttggtacatgatgtacgcagtttatcagataaaaacggagtagatttgcttgttactggatcaactgcagtgaatattgacatttcagatcgcctgaatgatgcgataccggtgtttgctgtacttattgttggctttgcgtttgtattgctgaccatcgttttccgttcgctgcttgtgccgcttgttgctgttgcaggtttcatgttgacgatgacagccactcttggaatctgtgtatttgtcttgcaagacgggaatctcatcgactttttcaaaatacctgaaaaagggccgatactcgcgttcctgccgattttatcgattgggattctgttcgggttagccatggattatcaagtattccttgtcagcagaatgcgtgaagaatatgtaaaaacaaacaatccagtacaagccattcaggctggattaaaacacagtggtcctgttgttacagcagccggcttgatcatgatcttcgtttttgcaggatttatctttgcaggcgaagcttctattaaagccaatgggctggctctttcctttggtgtactctttgatgcctttattgtaagaatgacactgattccaagtgtcatgaagctgatggggaatgcagcctggtatttgccgaaatggttagacaagattattccgaatgtggatatagaagggcatcaactgacaaaggaaatacagccggaaatagatcatgaacaaaagaaacaaatcagtgtgtaatagaaaaagcagatcttttatgatctgctcttttgcttatggtagtatttagaagatgaagtcggcagttaaaaggagacgcttatggcgccatcactcattttcgatatggatggaactttgtttcatattggcagaagctgcatcatactagcaggcatcccaggagaagtgacatgattttttgactttgcattcactacttgatgccaaggatcttgagaatccttcttgaaaataaaggattttacaactgatcatataagaaacctaaagaaacaagcacacaaaaccagctgcgggttttgtccaagaaaaatagagtccataagagggactctattttttgaagtgcccggctagaagcatattgcaggactttatgaatgcaaatcactatcttataagcccttaccgtgaaatgcctgtttctgcattgaaaaaacgcattacacgttcatttacgtaagtgggttgttccatcgataaaacatgtccggcatttttaatgacttccgcctcaatatctggaacgaatgaagaggctcggtgcagggctgagtggggatcatagatgacttcatgttcaccaagtaataataggataggaactcttgctgaacgtaattcctcatcggtaaaaacatacggaaatccgtcggcattaggatttggatttcttgatccatcctgccacattacccctgccttaaactgcttcacaaaaatcgggtgcagcacattctgatcattcatcatccaatttaagaatgtttcaactccatttgacgctgtaaggccaagagcgtatttgtagaaatcgtgatgaaatggcaaaaacgtttctgccggactcagtatagctgcgctttttactctctcaggcatacgtaaaaggaaattcatcgtatggagaccgccaagcgaaagtccgatcatgtgggacttttcgatccccagattgtcaaacacatcaagaagccaattggcgtaatccgttcttgtaccgcttacattctcaggaatactcttgtttttatcacctatgatatcaactgcataagttctgtatttactgctccaatcggcgatgttgggataccacatcgtcgagctgaataatgctccgtggagtaatacaagcggcggggcatcctctgggccgcttgcaatcacatgtgtttgaccaaaacgagtagatatatagaatgatttacaacggaccggccaaagactaaggctttcattataagtttgataatagcggataccgttgtcacttaattcgggaatactagatgaatggtttgacatacaaatgcccctcccaattttgtttaaatgaatgtgccgtttcgtgatggggaatctgattttgatataacagactttatttacaatataatacagttgttattagacgtcaaatccaagatgaaaaggaaaaaaacgattgaaacagattattgaaaatcaatataacagaatattaacctcctttgtggagccgcttcattaaaaccgcaatccaaatgcatgaatcacaaaaatcacaacaggagggatcaggagggaaggcagcagattcagtgttttgaacttcttgattccaagaatgcttagacctgaactgaggatgagtatgcctcccacaattgtgatttcattaataaggtctgtattgattgcgctctccattacttgtgcaaataaatagatggagccctgccaggaaaataatacaagtgcggcagccgctattccaaaaccaaaagttgaagcgagcacaatggaggtgatcccatctaacatcccgtttgtcagaaggtatgtataatctccatgcaaagcggcttcaacagggcctaatattgacagcgaacctatacaaaataataagaccgcagttgataagccctctgctaaattgcttttagaaaatttgttcaccagcttgttgaatcgtaattctaaattgatgatctggcctagcaaacctccaatggctaaactcacgatgaatagaatggggtatttactatcaggcaaatgctgtgtaatggcgttgatccccagtgcgaccgcagcgaatcccattgcctgcatcaaaatatcctggtattcatctttaatgccttttttgaatatccccccgattatgcttcctgcaatgatcatcactgtgttaaaaatcgttccaaacataagctttctcctccaaaaatcattcctgcataaaaaataaaccctctagttagtagagagtcaagggagatcaaaacatattcatgagattatttgatgggcagcaggatttcagtcacgtaattatctaggttattcgtaatgccataatcaatgagtgtgatttcgattgagtcccctgctacctcataatgatgttctttcatatatgccagtaattttttgtagtatggttcggcttctggatgtgaccctttaaacctaatttgcagatattctcttgaaggaaagatgatttctgaagaagttttttcattttcatcttcaagaatcataaatatactggaatatttgtcaaactgttttgctttcacatttgctgcagaaatggataaaccaatcttgcctatgaatatatcttcgtttacattcaggtgggttctcaattcagctaacgaatgttcgatatcatggccgagaacatattcatgctgcaaataggccacacgcattgcgggaagtttgatttttgaaatttgatgtaacggcatgttaacggcatcttctatatgtgtgatgcgtcgggagatctttcgttcaatgcgttccaattctttcttcttgcgatcaatttcaacctgctggctttttagtaaatgaagaagagtgtttgtattttgagagttataaaaatcaagaagcttattgattggcaggcctagggccctcaaatacttgatggtatccagccgctcaaactgttgggtagaataatatctatagttcgtttgctcatctttatattccggtttcaaaaggccgatttcatcataataccgaagagcagagattttcacattgaataactttgacacttctccaatcgaaaaaaattccttcattctaacaacctttctgtcctatgattgatatacacacattatatagtacggcgagtactaaaggtaaagtttgcagcataaagaaaaaactccttctaaaaaggagcttttcattcttcgaaataaggatttacatggatgagcacttcttctacatctgaaaactgtcttttgatttcatttcgaatttcgcgggcaatgtcgtgtccctgcttaattgtcaaatcatgatccaaagataaacggacatcaagcaatttatagtggccatgttctcgcgcgcggattctatcaattcgttttacctgatcacattgaaaaataacagctttatattcctctatcagctcgggatcaacactcttttccatgagcacatcaacagacggcctgattaattccattgaaatcttaaaaatgaggtaagcaacgattgcactggcaatggcatcggcgtacaacagataggaccatccacggctgtttccgatgatagccaacaggacgccgataaaagcggcaagagaggcaacgatatcgcctttatgatcgtacgcaatcgctataatcgctttgctgttccattttttcccttgctttatagaataacgatataagatttccttagccacgtacgaaatcagagccgcaaacaatgcgctgtattggggaacgcttggccctttaacaaaggacagaatcgcttctatgaggatataaacggatacgatcactaagataattcctacaatcgcctcactaatgacttcagcttttccgtgaccaaaaggatggtcttgatcgggcggtttattggaaattccgatcactgccaagactgcaatcgaagcaacgacatctgccgcggaatgtattccgtctgcaaacacggcttcactatcgcctaccagcccaaaaaagacctttcctgccattaagatcagattggcgatcaatgcaatcaaagcaacttttctgcttatttgttctctttcacttgccattttttcctcctataaaactgcacaaaaaaataggagtgctctatatacgctctccgtatcctttcctgtgtaatcactttgtttatcataccaattcaatttcgagtgggtctatagcaacgttgtttcctgtttactaataaataaggtgacagaaaaaaagttggagctatgctaaaaaggtcatacagcaaacaaatgagttcttatgtaacaacagtgatgattcgctattaaaatgctgccgtcagtgaaaaatttccacctaattttcaaaaacctattgacatgagaagatctgtattttactattatctcatattcaagatattttaatttgagatatttggtcggaaagatcagcgatcaagcgcaactctaagtgttcaatcgttgtcagttcttttacacaatattcaatatgattttttataacataatatctcgaattcgagataaaagggagtgtagcgtaatggctgaatttactcatttagtcaatgaaagacgatctgcaagcaattttctttcaggtcatccaatcacaaaagaagatctcaatgagatgtttgaattggttgcattggcaccatcggcttttaatttgcagcatacaaaatatgtgacggttcttgaccaggacgtaaaggaaaagctgaagcaggccgcaaacggacaatataaagtggttagctcttctgcggttctcttggtattaggggataagcaggcatatcaacaagcggccgatatctatgaaggtttaaaggtattggggatattaaataagcaagagtatgaccacatggtgcaagacaccgtttcgttttatgaaaacaggggagaacaatttaagagagatgaggcgataaggaatgcttcactttctgcgatgatgtttatgctgagtgctaaggaaaaaggctgggatacctgcccgatgatcggctttgatgcggaagccgtaaaacggattttgaacatagacgaccaatttgaggttgtcatgatgattacgattggaaaagaaaaaacagagagcagaagaccgcgcggctaccggaagcctgtgaatgagtttgttgagtatatgtaaaaggagcggataaaaatggctaaaaaaacgatgggaattcatcatattacagcgattgtcggtcaccctcaagagaacacagatttttacgcaggagtgcttgggcttcgtttggtcaagcaaactgtcaattttgatgacccaggtacgtatcatctttattttgggaatgaaggcgggaagccgggaacaatcattaccttctttccgtgggccggagcccgccaaggcgtcattggagacggtcaagttggcgtgacttcgtatgtcgtgccgaaaggggctatggcattttgggaaaagagactagaaaagttcaacgttccctacaccaaaatcgagcgctttggggaacaatatgtagaatttgatgatcctcatggactgcacttagaaatcgtggaaagagaagaaggagaggctaatacgtggactttcggagaagtaacgcccgatgttgccattaaaggttttgggggtgcaaccctattatcagagcagcctgacaaaaccgctgaccttttagaaaacatcatggggctggagcgagtcggcaaagaaggagacttcgttcgttatcgttccgccggtgatatcggaaatgtgattgaccttaagttaacgcctattggccgcgggcaaatgggggccggaacggtgcatcacatcgcttggcgggctaacgatgatgaagatcagttagattggcaaagatatattgcttcccacggatatggtgtaactcctgttcgggatagaaactactttaatgccatttacttcagggaacacggggaaatcctgtttgaaatcgcaactgatcccccaggctttgcacatgatgaaacacaggaaacaatgggcgaaaaactgatgctgcctgtgcaatatgaaccgcatcgcacacaaattgaacaagggctgctgccgtttgaagtaagagagttagattgatttgacacataaaaaataaagaaacatatattcaattgatgattgctggatggtactgtcagcaaagaatcagataaaatcaaagatgaggagagatacaaatggaagatgcaggactgttgcttattcgtataatgattggtgtggtgtttttgttttatggcacacaaaaattattcggctggtttggcggatacgggattaaaggaaccggacaatggttcgaatcaattggggtgaaaccaggaaacgttgcggccgctctatcaggtcttggggagttagtaagcggaattctatttattttaggcgtattcctcccgcttggagctgctatcataacaatcatcatgttaggtgctatcgtaaaagtccatggagcgaaaggttttgcgaatggcgccggaggttttgaatataacctggtgctcattgcagtttccataggggttgcactcatcggttcaggagcttacgctttgcatttttaatacgaaagtatgtaagaacagttgctgcttgtcagtaactgttcttttattttcacattttcggcaagcttgcaggtactctgcaaagcaaaaaagcggatatcataaatataaatctgtatagtgaatgatacgtattgatgagcttggtcatgaaaaacagacctatttgaaggagtaaatggatgaaagagatgacaggattacattcattagtttctatagaaaactttatcaaacagcacaaattcagttttatttatatatcaaggcctggctgtacagtatgtcacgcagttctgccccagctcagaatagtattggatcagtttccaaacatcaaattggggcatatcaatgctgacgatgtagcagaggtcgccggcagattttcagttttcaccgttcctgtgcttcttttgttcattgatgggactgagtttctaagagaagcccgttttgttcattttgaacagcttgaacaaaagctgaaaagggtttatcgattatatgaaggcgaataaaggaataaggcaaaaaaagaactcaaatgagttctttttttattcttcactaggcgaagaagggttatcaacctgcccttgatcacttgtatcattatcacaacttgctgaaataataattgaatgagaaggagagtaatctcctaatgtgaaattcactccgtaatttttgctgttcgcagtatggctgttttgcaagttttgtccgatatctgtattggcgttttgtgtcattccatttatcgtgagatttgagatgttgatttgagatcgcatgcttcaaaaactcctttcactcagaagtagctgtcataaaggacgctggcagtctatttacttctatgatattgcgtttttatatcattgcatcaacataatggtaaaaataatagcgagtgaatgatcatcttttgaagatgatcaacctatcagcagaaataaagccgcctgataaagaggcggcagatcgttatatgtcatctatgaatttgatgtatcgtttttcgtttgcctgaaggataagatagtcgtttttaatgatgagtaggagcctatagcagcgtagccataaaaccagcccataaatacgccagaaaagaggctgtgtcgatggcttatgaaaacagaaatgacaaggcctgttattaaggcaactgacggtacaaaagttttggggattttcaataatattttgaggatttgggttatcaatatgatgattggaacagctatcacagcatcccaaaagttcgtgtgaataattggaaaagccatacggcacctcatgaagtgtttatttcttaatttttacgctaaaagcttggaaagcagctcttggatcgcatatgttacattttgggcttgattggcggagcttgtttggcttaaagcattggattcaaaaaccaaacctgtattactcccaccggaaccctctgttgttttagacacagagaacgggctgatggaaactgcaaatccgttattaaaaacgctgttcccggatatcgaatgaatataaactgggaatttcatcattcatctctcctctctgttatgactgtttatacaatatggtgtgtgagcagcagttgcttaaacaaaacggcaaaaactttcagtaagagacaaaaacctgcaaaatgccacaagcgccttttgttaatgcagctttttagggacgttttttttattttttttgccaacttcatcaaaaatattctgattgccagactgggcttgtccgtccttatttatgaaatcggggtgaatgagttttttcagatccctgactgttaaaggcttggcgtcatcagttaattctattcctaattgcccgtttgcctctaatgtcgcaattttgacatcttgtatagccgtaacgccgtgaagccttagctgcatttcaagctggtcagctgtaagtctcatcttctttaagttttcgatatgaagctgtccgttttcaatgacgatttttgcttttccggttaacatcttttcaatggtgttcgatttcatttggatccattccataacgatgagtgtgcttgtgaaaattgccgctgcaattaatgttttgaagaggctgtactcgatgattggctgaacgataatagttccgatcgaaatcatgacaaccgtttgagtcgacgtcatttgtgcgattgatttccttcctgaaattctcagcaaaatgaccccggctacaatgagaacaagagattcccaagtgaaattcatgctaccacctgaccaatgatgaattagatttgtcatgggattggcttttcttccggccaatcgcaatttaatatatccgaaaggcagtcggttcattctgtcctgaaccgaacaatatttttggtatagatggatatattaagccaaacaatgatagcaacaggagttttttggccgaaacaatctgggaagcggggagcgccataacatgattgaacttgaagttgtcattagaacggttgccagctttggcttgctgttaatcgcagaacgaattttaggcaaacagacaatctctcaaatgacgatttttgattttattgcggcgatcacactaggggcgattgctgccggattagcttacaatacttcaataaaaccgcacaatatggccatttcgtttagtatttttgtgctaaccatttttctaatttcgtttctgtcgataaagaacaggaagctgaggaaattttttgccggagatccaacagtgctgattcaaaacgggaagatacttgaatcaaatatgaggaaaatgcgttacacacttgattatttaaatcagcaattacgggaaaaagaaatatttaatatcgaagaagttctttttgccattcttgaaacgaatggtcagctgactgtgttaagaaaaccgcaattccggcatgtgaccaaacaggatttaatgattgcggtaaaccaagaacaaaggcttccgatagaacttattatggacggagaaatcattgagaataatttaaagcagaatcgtttgacggaatcctggcttttggaagaattgcgaaaaagagacataaaggtgaaagagaccgtgtacgcagtgctgctgggtaatggggatatttatgtggatcaatataaagaccatatatcagtccctatggataaggaatgaaggaacaatcaatcttaaagccccttattgaacgcaacggtttcaacttgtcttgggtacgaaatatgcagaagcccgtttaacagctgaatctgtaacaaatgagtttcagcggcttcgggaagctgaatgattcgctcaatttctccgtaataccgttcacgcagcacttccatttcggctggaaaaacaggcgtgatcgttcctttgatcagcagctgggttttagacagtaaacggatcgttaattcttcctcatacacaccgggcatttccacaatgataaaattatattcctcatcttgataaaagtcgtaaacaaacgtagaagcttcggaatcaaaaaaatgttccggggctttatatttgagcacatttgtccaaaagtcactttgtttatattcattcgtaatctcaagccactttcgaattttttcgaaatccatatgagattctccttaaatttgatttgaaatcggcgcagaagggtttccgatttggtcttggtcactaacgtctgaatcaatatttccagtgtttaaaagtgaagacgtaggcgaaagatcccctaaggaaaagtttgctccaaaatatttgctgttcgcagtatggctgttgtgcacagtcggaccgacatctatatttccgttttgcgtgacgccgttgatcttaatatttgcgatattaatttgatatggcatagacgaaacccctttaatctaaaattggcggtggtgcaatcggaggagcattaacgttggatgtatcagagttgccgatagatgtctggtcatttacatcaggatcgtttaagaagttttccattacggattctgtaggtgatgtatcaccgaaagaagagttggtcccttgagatttttgattgttggtagggctgttataagcagcttcgcctattgtaattgaaccattgcccgaaatactgttgatcttcaaataatataggttgattactgtagacggcatcccatcacacccttccatctttctgtacagtacattatgcgccgctgcacccaattgttccttgcatttacgggcaaaactctatctggccccggagtgatgctcaattatcagtgaatgaaaagccattgatataggaatcaatgaattgattcagttattcgaaatgcatgagaccttttaataaaggaagctggcaaacaggatcagtttgaaataattgacaatgaagctaatgccatgaaataatactcgtgagtaacattactcgtgggtattatttttggggtggtcctagttgaaaagtaaaggagtagaaagccgaaaacgattacttaaagctgccgctaatgaattttcggttcggggattccatgacgcgaaggtaagtgaaattgtgaaaaaagctgggttcacgcagccttcattttacctgtactttcaaagcaaagaagccatctttgccgagttaataaccgattttcactctcgagtcagaaagctgacagagtcacttcttctggaaaacggattaaacacggaggatgtgtcaaaacgggtactgctagctgtagagactgtttttcaatttttggatgaggacaaggatttaaccaagatcggcttttttctcaacccggaagcaaaacaaatgaaaaaagacttggcgatggttttgaaagagaacttagaagcagaacagcggcttggctattttcactctgaactggatatggaaactgtcgctgagtgtttggtcggcatgattgaacatttaaccgaatcatttttgttaaccggaatcaaagatccggcaagcctcgcagcagaggttgtgaatcttttaatttacgggatgcttccgaaagggaatgatgtaagatgatatctattatgatgaaagtcagtttggcagtttttatgcttgcgggaggcatcataaaggtaagccgcgttccctttcaagttgagcattggcggcattatcaatatccattatggtttctgactgttactggcattcttgaaatagccggggcacttgctatgacagcgggaatttggaatcggtatgcagcaattggagcaggtgttctgtttgtcgttctcatggcgggagcaattcatgcgcatatgtttcgagcaagacaatctgtcatcatggcgatacaagcgatgatttgtttgattgtttcaatcatgatcatcatggggagttacacgtaagcttttcactaatgtttaagaacaagcccatttgcaggaaatctccttttcttatcgaataatagaaagtccaggaattaactgaatcagtaaaatagagctccatttctgtgttattcgtccggcatcagctgggctttttttataaaggaggaatacaggatggcattcactttggaagacatgactgaggaagagttcgaagcctttcgcgggatgtccgtgcaaaattttgcgaaacaaaacataacgtcaggaacttggacggaaaaagaggcatttgagaaatcggagcaggcatatgagaacatgattccgaatgggcgagacagcagcaatcattatttttggaacatcacaaatgaccaaggagaaagaatgggctggctctggctgtatgctgatccattacatccgcaaaaggaagcgtttatctattcctttggattgtatgaagcctttcgcggaaaaggacttgctcaattggcgcttcaaacgcttgatgaaagagcaagagagcttggtgcggaaaggctggctctacatgtatttgcacacaacgagacagccgtctatctttatcagaagatgggctatgccatgaccaatatacgtatgcggaaacagctatgctgaaaagccgcttacgttacccaaatacaacatgcctatctggaagcggtggcagggtactataagtcatcattagaaagattaaggtcatgggaggcttgaacatataaagaaaaaggacaacagctgttgtccttttcaatgccgcttgaactttctccctcagtcttttttgtcttgatgatccagctcttttattcgtttcgtaagctcattgaaagcctgatcaagctccttataccctttatcatttggcgtcataaaactgagctttcccagcacttcttgtctttctgtctcaagctttaaccgaagctcctcccgctcatttctttctgaaggaacgtcgtttaactgcttttcgatgccgttgtttgagatgacgagtttactgtttgttgttttttcgagaaagtatcggtcatgtgaaaccgccagcaatgtgccgctgtattgtgacagtgtttcttccagctgttcgcgtgacggcaggtcgagatggtttgtcggctcatctaaaatcagcacgtctttttcctccagaatatatgccatcagcttgatctttacacgctcacccatactcatatgcttgatcggttcagtccattgggcggctgtaaaacctaagtgcctcatcagattttgaacgtgcccccttgctttgaatgtttcattctcaaataactcttccggtgtttgttctaaaggcaaatcaaacacctcctgcgttaaatagccgatgtttgcggacggcgacacccatacacttccttctgctgtttcctgtcccagaatgatgttcagtaatgtcgtttttccgctgccattggggcctatgatcgcaaccttttcgccgtgctgaattgtaaagtttgcgtttttaaagagagtcctttctccaaacgcttttgttacattctgaacttctaaaaaacgttttcctgttttgtgggttgtatcgattgaaaagcggactgtatattctggggtaacgggttccgcctttgctttttcaagctctttttcaagccgcttctgcttggattttatctgggcatccgtacgcttcgcttttacccggtgatattctttaaacccttcctttttcgtcgattgagcatgggctttttccgaccaagaagcgagcccattcatttgtgcttcaatccgttcaaccattttttgctgcttttcatattcacgctgctgggtgagtcttttcttctcccggaacttcatatacccggagtaattccctttgaattcaatcagcgtctgatcctcaagcgaccatatttttgttgcggcttcgtctaaaaaatatcgatcgtgagaaacgagaatcacagtgccgttataatgtttcagctgttggatgagaaattgcaagcttttttcatcaaggtggtttgtcggttcatctaacagcagcagatctgcatcctctgatagtcctttcgccagccgcgctttcagtttttcaccgccgcttaactgatgaaaatcacgaagaggcacatgccatttctccagtaacttcttttcggcaggtgtctgatccgcaaaggaatacgccgcggtttcctgttcaaccaaagccagttttatatccttccgaaggatttgaccctgtgcaggggctaagtcattgtgaatgaggtgcagcaacgtagatttcccagcgccgtttttgccgataatcccaatgatatctccttgctgaacactggcgtttacatgtttaaaaacagtttgatcctttacttcatagctaacgtttgttaatgttacgatctctttcatccatatccctcgctttaaagggagaataaaaaaatcctcccaaatgtgttggaaggattagccgtgcctgtgcatgatcaaataagctattttttataaatagcagtgtcgtatatatagaaaatgggcagactaatcctattttttgatttgaaatattgatttcaaacggtaaaaataagattagttaatcattgtccacccatcatcccttcttgttttgattacaaacactatagcatacctttaaattcaaaagcaaaggtcattttcatcaaaaaaactcctgctctcatttttgaggcaggagttttgagtcttattgatgcttcgcttttctcactttataaatcacaatcagcaaaataaaccaaaccggtgtgacaaataaggaaacacgagtatcctgtgccagtgccagcacaaccagaacaaacgccaggaacgcaagaatcaggtaatttgtaaacggataaagcggaagcttaaacttgtttgttttcgctaattcaggtcttgttttgcggtatttcatatggcagatgaccgtaatcccccaaatgtagataaagcatacggttgaaatacttgtgatcagggtgaatacgccttctggcatgatgtagtttaacgtaacaccgattaaaatcacgatagctgaaaagaataaagcatttctaggcactttacgctgagtcagtttcgccattgactcaggcgcattgtgatctttcgccagggaatagaccatacggcttgtactgaatacagcgctgttgcatgctgaagcagcggatgtcaacacaacaaagttgataatacttgcagccccgacgatgccaacagcgacaaatacttgtacgaatgggctttcgctgggattgatgatatcccaaggatagatgctcataatcacgagaagagccccgatataaaaaagcagcacacggacaggaatattgttgatcgccttagggattactttttcagggttttctgtttcaccggccgtaagcccgacaagctcaatgccgacaaaagcaaacacaaccatctggaacgagaggataaacccgtgcatgccattcgggaacaggcctccgtggctccagaggtttgtgaagctggacactcctgagcttgtggaaaagcctttgaaaatcatcacaaggccaatgacgattaacgccaaaatggcaatgactttaatcaaagcgaaccaaaattctaattctccaaaaagcttgactgtcgccagattcataatcagtaaaataataagagcgattaagccaggcacccattgcggcacacccgggagccaatattgagtgtagagcccgactgctgtcagatcagccatcgcaatggaaatccagcagaaccaatatgtccagccggtgataaaagctgccatatcgcctaggtagtcttgtacaaaatccacaaaagagtgatagttcaagtttgataacagcagttcacccagcgatctcataattaaaaagcaaatgatccctgtgatcatataagcaaataaaatcgaaggtccggcaaaatgaatcgatttgcccgagccgagaaataagcctgtcccaatggctccgccgatggcgatgagctggatatgcctgtttttcaagcctctctgcaacgtttgctgatttatattgtctttcgtcatgtcgtctgtcactttatgtgttcctccattgaaaattgtttattgagtcagcaatctatttttaatgattattataacactaaaatttctatcttttttactaaaaaaggattgatgaaaagaattttaatgtgatttggactatttcccgaaaaaagcggctccatttagggagccgcttttttatgctttttcagtttttgtcataaacaggtagagcccgtaatctgtcggtgcggatgcgtagcctgcctgccgcagcattgctgtgatattgccgcggtggtatgtcccgtgattgacaacgtggggaagcagttcggaaacagttgttttcatgattccgcttgagggattttgaatctggagtggcttattgagctgttctttttgctgtaaaaatagtatatagcgctcggataacctcagaaaaaggtcttccatttcctctatttctttagcctctgtctgttctttaagctgttcagctaaagccaacgcatcgctcaaggttttgccggaaaacacttcaatccagccgagatcagaaagataaacatgagacaatacatgggatattgacggaaacacgctttgaatttcttgatggtatatctcttttggaagctcttttaatcggttgaatatttgttgattggcccagacgttatattcatacaatttgaatgcaaaatctgacatgttaaaattccccctttcgtgtgtatagctttcattatacacgaacatgagttcttatgtagagtgctcgaaaataaaatttgttgacatatatagtttagaggaataaactaattgacattgaacataaagtttagcggggtaaactataatgaggaggggaagatattgaatgaacaaaagctatgtcaggcgataaacctgtttgtggaagtcctgcttgaagggacagaatttgtgcatcgtgaaatcaatcaggatgtcttcaagcatatctcaagggaacaggcagacctgttgaaaattttaaaagtcaagggcccaacctctcccggcagcctggccatgtaccaaaatgtacataagagcgcgatctctaacagactgaaaaagctgctcgaaaagggattggttcaatgggacgactgtccggaaaaaagtgataggcgctctaagcttattaacattacacccagtggtgaacacatactagaagaattagattctgccatctttaacgcgctcaaaccgttgattgatgatatagatgaggaacacttacattctatcatcgagatattcaccattttaaaaagcaaatttaaaggaggagattctgccgaatgagagcaatcatcaaattcaagtgggcaattgcagccatagtattagcacttaccgtcgttttgagtttgttttctccgaacttaacggagctggccaatcaaaaggggcaggcccagcttcccgctgatgctgtttcagaaagggcaaacgccattttaaaacaagcgggagaagacaataattcgatcagtgtagtctttacattagacaacgctataaagaaagaaacagagaatcagctccggataataattgataaaatcaaaaagatcgacggtgtagaagaggtaacatctcctctgtcagcggaaaaagaagtcaaagaccagttgatgtcgaaagacaagaaaaccgttctcatgcctgtcacgattacaggttctgataaaaaggcggaaaaaattgcggacgagatttatcaaatcgttcctgatgacttgacggcatatattacgggagcttcccttatcaaccaggatttcgctcacagctcagaggaagggcttaagaaaacggaagtgataacagtctgcctgatcatcggtttactgttgatcgtgttccgatctgttgtgacgccttttatcccgattgtggttgtcggtttttcttatctgatcagtcaatctatactgggcatccttgtatacaatgttgattttcctatctcgacgtttacgcaaaccttcttagttgcgatcctgttcggcattggaacagattactgcatactgcttcttacacggttccgtgaagaattggcaaacgggcatgataaaaaagaagcggcgcttatcgcttaccgcacagggggaaaaaccttatttatcagcggatttgcggtattgatcggattttccgccttaggatttgcgaagtttgcgattttccaatccgcagtaggggtagcagtcggtgtgggaattttaatgatcatcctctacacactgctgccattatttatggtgacgctgggtgaaaaattattctggccttctaagaaagtgctgtcacacagtgataacaaactatgggcgtttctcggcagacactccgttgcgcgtccgtttctgttcattgtcatcacggtggtgattacgcttccgttcatcttgacctatgatgaccagatttcattcgactcaactgcggaaatcagcagcgattataaatctataaaagctctcgaggccattaaggatggattcggggaaggaaaagcgttcccgatcaatgttgtcgtaaaaggagacaaagatcttacaacagctgatacaatcccctatctaggaaatatcagcaaagcgatcgagaaagttgatcatgttgactctgttatgaccattacgcagccgactggtaaaaaaatcaaagatttatatattgataaccagctaggatcggtttcagacgggctggataagacggtgaaagggattgccgatgtccaaagcggattaacggatatagaaaacggactgaatcaaatggcagggcaaaccggctcggcctcaaatggagggtctggcggttcactgggcgatgcggcagatggcttgggcaaaatcaatcagcagctgcagctcgtgagcaaacagatttcccaaaccggcaataccgcacagaccgtgcagcagcttacggcaataagcggacagcttggccagattcaaaccggccttgaacaagcgaaccaacagctctcaggccagcaggcacaagccggaacgctgacagaaagcctgaaaaagctgtccgaaggcgtgaaaagcgcaaatgagggcctgacgaaagtctctgacggtattacagcttccagtgatatattagaggacatgagcaaaagtccaactgtaagagatactggcatattcattcctgatcaagtaatgaaggacaaagactttaagaagtcaattgaccagtattcctttgcagacggcaaaggtgttcaattaagtgtcgttctggattcaaatccgtactcagaacaagctattacgacaataaaccaaatcaaaaaagctgtcgcaaacgaagttgacggcactcctttggagaatgcacagatcgtgtacggcggggtcacgagtatgaatgcggacttaaaggagctatccacaacggacttctccagaacaatggtgattatgattataggcctgtttatcgtgttaaccattttgttccgctcaatgatcatgccgatttatatgatcgcgtcattgctgctgacgtactatacgtcgatatccataacagaattaatttttgtaaacggcttaggaaacgcgggtgtcagctgggcagtgccattcttcagctttgtcatcttgatcgcgttaggggtagattattcgatcttcttgctggatcgatttaaggaagaggtgcaccttggcattgagcaaggtgtcgtcaggtcaatgagcaaaatgggatctgtcattattacagctgccattatattggccggtacgttcgcggcgatgatgccttcaggtgtcaatacactgatgcaggtggcaagtgttatcatcatcgggctcttgctttacggccttgtcatacttccgctcttcatcccggcaatcattgcgacctttggagaaggaaactggtggccgttcggcaggaagaaaggaaaagagtaatcgagagaagagtgatgaatggtcatcactcttttttcatgactaaacgactaacttcagacgtgttacccaaaaagatcagacgatcaaacggcggctgtacttaaaaacaaagagcccggaaaacattcccgggctctttgttttatttccattctgcaattgtatcaatcggcagacggtaggaagcatagccttcgtctgctgcttttccgatagaaagtagcataaccggtacataacgttctttatctaatccgaaggtttccgcgatgttttctttatcgtatccgccgatcgggtttgtatcgtagccatgcgcgcgtgcagtcagcatcagctgcatggaaacaagacctccgtcaatcaggatcgtttcacggttgacctgtgccggaagcttttcaaaatgtgcggtcagcgcggcgatttgtctgtctttgacctcctgcggcatgtaaccaagttccacggcttttgaatagatttcttctagatagtctgcgttgttcatgtctgcaaatacagcgatgacagcagatgatgttgtgacttgtgtttggttaaagcttgcaagcggtgcgagcttttcttttccttccgggctgtcaatgacaagaaaacgccatggctgcgcgttaacagaagatggggcagttgttgcttcctctaagatctctgtcatttcttctttgctgatttttactgccggatcatagttgcggatagaacggcggcctttcataatttccataaaatcgtttgttttgatcatgttgatacactcctcttaagcttcgatattatttatattgtttcgcatgcgcgccagcacatcaatgagcaggcggcgttcttctgcgcttacatttgcgagcatttccttcatgaaacgctccttttccttcttagaagactcaattcgctctcttccttggtctgttaaccgaacaagggtgatgcggttgtcctcaggcttgcgccgccttgataccatgcctttggattccagctgtttcaggtgtctggtaacggctgcgctatcgatatttactttcttttgaaggtcgctttgactgatctcatctgcatgataaagcaatgtcagcaattccaaacgagattggctgatgcccgtgcatgcctcgaacttcacgccaatcaccttgttcacgccttgcagctgatataaaatctcggcttcctctgaacaaaatgacgccaaaacccatcccttctttcctgtcaaaactattaattgatatatcaatgattgacacgtcaattaatatacaacgattgatttcatcttgcaagccatttgcacttttgaacaacctcccagcgcataaaattcgctaggctagaacttagcaaaaaaagctggccgcttcttcagatgatgctggtcacgatgattccctgcatcattcccatttataggtgttcggaatatcactttgccggcccgtgctcaagcggctttcacaggctgaaagttatgatacaatatacaaatgtttcacagcttcaatccatagttggagctgacatccattatataagggactaggttgaagggaaggtttgataacatgctgcacaatccaactggaaaagaacgcttggcactagcgtttctgctcggcatgcttgctatattgggcccgcttaatatagatatgtatttgccaagttttcctgaaatcgcgaaagatttatcagcaagtgcttcacttgttcagttaagtttaacagcctgtctggtcgggcttacgatcggccagctgattgtcgggccggtcagcgatgcgcagggaagacgaaaaccgctattaatctgtatttttttatttgcgttatcttctctgttttgtgcactgtcgcccaatataacaactttagtggctgcgcgttttttacaaggcttcactgcttctgcagggcttgtgctgtctcgcgcaatcgtccgcgatgtgtttaccggaagagagctttctaaatttttctcgctgttaatggtcattaccgcggtggcgccaatggttgcgcctatgacaggcggtgccattttgcttttgccgttcgcaacgtggcatacaatttttcacgtcttaatgatcatcggatttttactagttcttctgattgcattgaggttaaaagaaacgcttccgctggaaaaacggattccaagctcaatcggaacatccgtcaaaacgatgggcagcctgctgaaggatcgatcctttatggggtacgcgttaactgtcggatttattcacgggggaagctttgcatatgtgtctggtacgccttttgtataccaggatatctacggggtgtctccgcaggtatttagtattctttttggcattaacgggctggcgattatatcgggcagctttatcatcggacgctttggcggaatcattcatgaaaaaagcctgcttcgtatagcggtcattacggctatgattgcgacggctgtgctattaaccatgaccatgattcacggtcctcttgctacattagtcatatccattttcatttacatgattacgatcggcatggttctgaccagcacgtttaccctagccatggaaaagcaggggcaccgcgccggaagtgcaagtgcgctgcttggaatgcttccgctgctcctcggttcaatcgtgtcaccgcttgtaggcattaatgagacaacagccgttccgatgggagccatcatgtttgtgacagctgtcatcggctcactggcgttttttggattaacgaaagaacgagtagggcagaattcataaaaaaacctgacatgacgtcaggttttttgttttatttagaataacaacagcaggcctgcaatcgccggagtcaaaaagatggctgatttcaaaaccacctttggcatgaggttggtgaatttcgcgcctacataggccccgcacattgtcccgaccagaactttgacaagtaaaacgtaatcaacaaaaccttctgtaatatatccgatgcctccacctacagccagagggatgatcacaagcatcgtcgttccgacagaatggcgaatggacagattcagcataatcattaaaccgatttgaataaaaggtgccgacccgatgccgaatgtgccggaaagaacgccggctgcaattcctaagatgaccgctctcgtatacgttgaaagagtgctttgattcacttgagccttctcttttaaaataaataatctgattaaaatgagaattgctgataaaaataacattccagccgtcaaataatgaagcaaatcagccggaataaaagaagtcagcttggcgccgaaaaatgagccaaccgcagcaaagcctccgactattaagccgattttcatttgaatgttaccctcgcgatagtggctgtatgcccctgataagcttgtaaaagccatgccggcaagcgaagtgcctaaagccgtatgaatcgggatatggaaaagaagcgttaaaagggcaatgacaaagccggctccaccggcgccaataaagcctaaaataattcctagaagaaacataacaagaataatgagcatattttttcctccattgaaaagatgtaaaaatgtaatcgtgcgctattctggcggaggtatggtgtcctattgacgaagaaaaacacgccgttttttcagttgccagtagtccgtcgaccgtcgttcagcaaacatatcgtacctcaaattcagggatctgacaaggcagtttgttgcttcccattaccatctgttatatgattttgatgaagaaaagcccttgaatatattcaaaagaggtattatatatggacgattttaaattagataagccgactccctactacctgcaattttataaccagctaaaaaaaatgatcttcaacgggacttttaagcctggggaacggataaacgaaacacagctggcgaaaagctttggcgtcagccgctctccgataagggaagccatgcgattgcttgagaaagatggtttgttaaaagcggatgaccgaaatgggttttcgatcacgtcgttaacggcaaaagatgtagatgagatttataaaatcagaattccgctggagcagctggcagtcgaattagtcatagacgaagcggacgaagaagagctgaccatactcgaaaaacagcttgaagaaacagagaaagcgattcacaacggcacggaagatacagaaatcattcgtttaaaccaaaaatttcatgagctgctggttgatttcagccataacagacatttgaaaaatttgcttgagcatgtaaatgacctgattcatttttgcagaatccttaattataccggcgaccaccgcgcagaaacgatactgcgtgagcaccgcaggatatttgaagaagtgaaaaagaaaaacaaagaagcagccaaacaacatgtgctggctcatttcaatcatgactgtgagcatttgaagcatgtgcttgaagaaggtaaagagaattgatttgtatgatccggtaccaagggagagcagaacccttggtatttttttatgtattcaccacatatctaagaggccccgttaataagattttatgatggtttgactaacgaataatgggggttaaatatgtttatccatatcgtcgggcctggtgattctttgttttcgataggcagaagatacggtgcttctgttgatcaaatacggggtgtgaatggtttagatgaaacgaatatcgtgccggggcaggctctgcttatccctctttatgtatatacagtccagccgagagatacgcttaccgccattgcagctaaagcgtttgtgccattagagcgactgcgagcggccaatccgggcatcagcccaaatgctttacaagcgggagcaaaaataacgattccttcgatctcaaattacattgcgggaacgttaagtttttatgtgctccgaaacccagacctcgatcgggaattaatcaatgattatgcgccatactcgtcttcgatttcaattttcgaataccatattgcaccgaacggcgacattgcaaaccaattgaatgatgcggccgctattgagacaacttggcaaagacgagtcacgccgctggcaacaataacgaaccttacatcaggaggcttcagtacggagattgttcaccaagtgctaaacaatccgacagcgagaaccaatctggtcaacaacatttatgacttagtttccacaaggggatatggcggtgtcacaatcgattttgagcaggtgagcgccgcggatcgcgatcttttcactggatttttacgccagctgagagatcgacttcaggcgggagggtatgtgctgacgatagctgttcctgcaaaaacaagtgataatatcccatggctgaggggctacgattacggggggataggagcggttgtcaattatatgtttatcatggcttatgattggcatcatgcgggaagtgagccgggtcctgtagcgccgattactgaaataaggagaaccattgagtttacgattgcgcaggtgccgagcagaaaaatcattatcggagtcccgctctacgggtacgactggatcatcccgtaccagccgggcacagttgcttcagcgatttcaaatcaaaacgcaatcgaaagagcgatgaggtaccaagccccgatacaatattcagccgaatatcaatcaccgtttttccggtacagtgatcagcaggggcggacgcatgaggtatggtttgaggatgtcagaagcatgagccggaagatgcagatcgtccgtgaatacagattgcaggctattggcgcttggcagttaacgctgggctttacgccgggcccatggcttctgcggaaattttttacgatcagaaaagtgtaaaaaaagacaccagagcttgggtgtcttttttttgattaagtccagagcagcagaatagttcattcatttgtaccttgcatgggttgtgttcccattttacgattagtagtagtctgatcaaacaaagagtcagaatacgatttgagagggagttgtctacatgaagacagtattgattttgaattttcctgcggaaggccatgtgaatcctactttaggcattacgaaagcgttttccgataagggatatgatgtccattatatatccactgaaaaatataaaaaacgattagaagcagcgggagcaacggtccatcttcaccgggatctgctgcgaacgacacctattcatgtcggttcgcccaatggcattcttgatttcgtgaaaatccatatcaaaacgtcattggacattttacagattgtcaaagacttatctaagagcattcaatttgattttgtttattatgataaattcggcgcgggggaattggtgagggattacttagatattccaggggtctcttcatcggcgtctttcctgtttggcgaggagcatctgaaaatcctgccgctgcatccggagtctggagcgccgcttgaattggatcaagagtgcgaagaccttttggcaaaaatgaaagaaacgtacggtgttgccccgaaaaacctggttcaattcatgaacaataaaggggaattgaacgtagtgtatacaagccgttattttcagccagaaagtgatcgtttcggggatgaatgtctatttatcgggccgagctttccaaagagagcggaaaaaacagatttcccgattgaacagctaaaagatgagaaggtcatttatatttcaatggggactgtactggatcatacagaggatttcttcaacctttgtattgatgcattttcaggctttaacggaaaagtcgtcatcgctgccggagaaaaagcggacctgaccaaattaaagcaggcgccggaaaactttatcattgctccgtatgtccctcagctggaagtgctggagcaatcggatgttttcattacacacggcggaatgaacagcgtaaacgaaggcattcatttcagcgtgccactggttgtcatgcctcatgacaaggatcagccgatggtggcgcagcgtctctctgaactccatgcaggctatgtcatctctaaagatgaagtcaatgcccaaatattaaaacaggccgtagatgaggttttgcgcaacgatcagtatacggcaggcattaaaaaaatcaatcaaagcttcaaagaatgtatggacatggaagaagtgatggagcggattgatgagttgattcgccaaaaaaacaaataagaaaaagaactcccgtaccttgtacgggagttcttgatttaaaacttgattttgattttttgagcatcactgattttcttatggttatggtcaaagacgtcacttgtcgtgatttcgatccacttgatctcttttgttttcttctcagcatccgcggccttatcatgagcatggccgcttgatgcgttcacaataaagccgagatttccggacttttcggcgccgccttccaattcgccgtttaactcttcaagataaatatctttgttccaatcaaaggtttcacccgtatttgttttcatcaatgcaatcggcgcaacatttactttttttgtagaggtgttcttgatatcaacgaaaaccttaacgaaatcaaactcttcatcgtgtgttaactcatgaaagtaatcaatcatgctgtagtccgggcgcaagtggatcagcttcatttcttttactgttaactccacgtcgccaattttataggttttgttcacttgtttgatatcttttaagacagcttttcctttatcatctgaaaacgtttggccgaccttatgcaatgtccggtcatcagttacctgggaattaggctgataatcatctgtgctgtccttctgggatgaagtgctttgcggctcagcttttactgttttctccccgcctgcatgctgtttttcagtactggcgtttgatgagcagcccgcaagcatgatagcaaaaacgagaattgaaagaattcttctcatgatgattcctccattaaaaagagatcccgttacttcatacaagcaacgggacaccttgtattcttttacttatcgttaatcttaatgttgtattgtaaagccttgaaaacatttttggcgatttctgtattgtcgatttggccggcaaatgtctcactagacggaccgtatgcatagacgggaacatcttcaccggtatgtccgcctgttgtccatccagtgtgagagcgtttattaaagatgttctcgattgcgttatcgatatccagtacttccttcgattttgccgcttcttcaacagattgaatttcggcttttgttaaagccaatttcttttgatcgatatatgttttcaacgttttttcaacatccgcgccgtcagcgatcttttctgccataaagtctggtgtgcgctttgcggctttaatgggttcactgaaccagttgtagatgccgtccgcaccgatggaatatccgccggttgagtggtcagccgttgcgacaaccaatgtgtgcttgtcttttttagcgaaatcaatagccgccttataagcttgttcgaagtcttccatctcgctcatggcgccaacgatatcattgtcatggcccgcccagtcaatctggctgccttccaccatgaggaagaatccgtctttatccttgtttaattttttaatggctgtgtttgtcatatctttaagtgatggaatatccttcgtacggtcaatctttttaggcaggccgccgtcagcgaataggccgagaacttggctgtctttgtttttcagcatgtccttgcgatcatccacgtagctgtaccccgcctttttgaattccttaatcaaattacggtccttacggtcaaaattgctctttcctccgcctagaaggacatcaattttgtgcttgccgttgaccatctcatcaaaataatcatccgcaattgagttcatattttttcggctgtggtcgtgtgaaccaaaagaggccggagtggcgtgtgtaatttctgaagtggccacaagtcctgttgcttttcctttttctttcgcagcttcaagcaccgttttggcttctgacccgtcgttatcaacggctatggcattattgtatgttttaattcccgcagacatagccgttgccgccgctgcagaatccgttacattttgttcaggatcatcggggtaagttgtttgctggccgacaagatactgatcaaaagccgtaggctccacaacttttgtctttttattatcctttaagtatcgataagcagacgtataagacacacccataccatcaccaatcagaacaataacatttttaatttcgtcttggttcccctttttcttttcctgggcgctggcttcaggcacactgccgctggctaagctgctgaacgcaattgatgataaaaccgcgataggcagtaatttcttcgggaattttttcaactggataacctcctaaatatagatgaatctcaatgacaacccaattatatttttaaactgttaagctagtattaatcgattttaaagattggatttacaagaataatgaactggcacccttaaataatggttattcttttatgagaagttttagaaggaaagagcgatagtactaaagaaataaattggaggaatagatactggccgtggataggcggactgaaatctgctatagtcgcatagaagcaacccgcttacatcttgaacaatttaaagtattacgttggaaagaggtattgtgtaagcacatgtctgagcagttcatatggagtggcatcattttattttaggagggaacaacatggacgttttttctgagtacttagcggggattgctgacccgttccaccgagaaagaacggaagaggtgttaacttggataaaaaataaatatccaaatttacatacagaaataaaatggaatcagccgatgtttacggatcacggtacatttattattggctttagtgtttctaaaaagcatttagctgtcgctcctgaaaaagtaacgatagcgcacgtagaggatgatattgtgaaggccggatatgattacaccgagcagctgatacgtatcccttggaacggtccagttgattatacgctacttgagaaaatgattgagtttaatattctggacaaggcggactgctccactttttggcggaaatgaagaaaaaggcataacatatgagctgtataaaatatgttacgccttttcatttgtctatttttcgttttgatcatctattgctgcttttcatcaaacaaggtcttttcattgagcgtaagctgactcgcagaataatgattaccttgtttccatttcacttcaatcgtaatatcatggccttcaagctcatgttcatctaaccgctctaaaaaagaaacggacttttcttttgcgcttccatcagaaaaagtgcctccagcataatcatgcatcgggatttccgtgtcagaactcagcagaacttcatcatccttttttacaatcagtgattccagataagtgttgtctatttcaattgtatcaccgatccaataaagtttgccgctgtattcattcggtgcatcttcattttttgtgaaaacagcttcccaattctgatctttgctttctccctgccaatttggatactccaaacgaacatgatgaatcaggtgataggaaaaaaagatcaagcagaaagcgattaataggaatgccgtgaaaatgagagggtatttataatgactggacataaaagactcctattcgtttaatcaattaccttcgaaaatagaatttcatcccgaatcaaaatgccgttttcagccacctcgggaatctccggcttgagtcggcgcgctttttcaactgcgttcggaaacactgcggcgaattgatagcctctcttttgataaaacgctatcgcatttacattatcattcgttgtgataagctttattcgttgacaatgtgcatgtttagccttctcttcaacctgctgaagtaaagctgtgccgattcctttattttcaatcatactatctaatgaaataatttcacaatctttcccatctattgtgtatgtaatacagccaatgatttcgccgctttcatttactgcggcaaatccatctaattcatcacaccgaaaaatgccgctggaaatcgccatctcgggtgtaccccaatgcttggcaaaaaaatcggtcaacatatgtttcgctatctcattgtttgggatgatgatcatcataacactcctctattgaaagattgcatatgtactatcaatataaacaatatataacaaaaaaaatagatgttgaggtgacggcatggaaatcagcgatatcatttacgggcagcaccatatagacggagtgctggaagagcttatcaaaagcgctcctgtgcaaagattaaaaggaatctatcaaggcggagcaagctttttagtcaatcgaaagtggaatgtgaccaggtatgagcactccatcggcgtgatgctcctcatcaaaaagctcggaggaacgatagaagaacagattgcgggtctgctccacgacgtatcacacacagctttttctcatgtggtcgacgttgtctttgaaaatcaagcagaagactatcatgaaaacatctttcaacaagtcattgttcactctgaaatcccggacattttacaaaaacacggctatcatactgaagaacttttatctgacgattcaaggtggacattgctcgaacagcccgcaccggagctgtgtgctgatcggacagactatacgctgcgtgatatgtaccgatatggacacattaacctgcacgaagcgcaaacctttttggatcatcttattgtgagaaacggaaggatgtttcctgatagtattgaagccgccgaatggtttgtcagtgtgtactacaaggaagtaattgatttctttttgaatcctgtgaatgtatatggatatgaatatttagcgcgagcattgaaggcagcgctgcggcatgatgtcatatctgcagaggatctgctgaaaacggaccaagaggtactgaacatcctgcgtgcatcaaaaaatgaagaagtcctgagcttgcttacatccattcatcccggcatacaagtaatagaggatgacatccagtacgatttccatcaaaagaagaaaatgcgcctaatcgatccatccatttttcttgatgacaaatggatcaaatcctcaggtgtttctgaaaaggtgaggaaaatgggtgaggccgcttatcaaaaagcaaaaaaaggtgtgtatataaaaatcttaaagcagtaattgccgcctgacagcggctttttttatgtttggctttgcaaacaaaggggaataggacaaactgcgggaacgctttatgagaatatcagcgtatttacataccgttcgggggtatagtattatcgagagggcatgttttcattgtctgcgggcaaaagttacaggaaaaaaatgaagcaaaggagaatgaacatgaaaatctctaaatatgcactgggaattctgatgttatctctagtttttgttttatcagcatgcggcaataacaacagtacgaaagaaagcacacatgacaatcattcagactcctcaacacatgaagagatggaccattccggatcagctgacgttccagagggattacaggaatctaaaaatccgaaatacaaagtaggcagccaagtaatcatcaatacttctcatatgaaaggcatgaaaggtgctgaagctacggtaacaggcgcctatgatacaacggcgtatgttgtttcttatactccgactaatgggggacagcgtgtggatcatcacaaatgggtgatccaagaagaaatcaaagatgccggagataaaacgttacaacccggagatcaggtgattttagaggcttctcatatgaaaggcatgaaaggagcaacagccgagatcgattccgcggaaaaaacaactgtatacatggttgactacacatcgacaacgagcggcgaaaaagtgaaaaaccacaaatgggtcacagaagatgagctttcagctaaataataaaaaatcctccttttacaaggaggatttttttgctgtttgaacaggtcttgttaaagaaatgaaagcaaacaggacagcgatgatcacaatcgatccgccgcaccatgccgttgacaccacagtacccgtctgatccaaaacaacaccgccaatggctgagccaagggcaattccgacttggagggccgatgtgttaaagctttgctgaatgtcagacgaatcaggtgcaatttcaattaaatagctttgctgagccggggcgaggctccagctcagaagaccccaaatcaccatgacaggcaaaaagaaaatcatagacgatgtagacagcggcagtaagaacataatgatggcaaaggaaccggtcaccagcaaaatgctcttaaaggaaccaagccggtcagatagcgctcctccgaaagggcctccgcatacagcagatatcccgaaaaggaaataacaaatgctgacccagaaagagctcaggtgaagagtctcttctaaaaacggcgcaaagtaagcgtaaagcgtgtagtggccagctaatgtaaacatcgtgacgaggtgtgaactcgcgattttcagattaccgatcgtcttgagttgttcccggaaaggaatcattttctccgccggtattctttcaaagaagattgaaataatcagcatggagatcagtgccaacaggccgatgccaaggaacaaaatccgccacccgaaggaatcgctgattaagattccgagcggcacgcctaatgcgatagcagagctgaatcccataaaaataattccgattgcgcgggctctgtattcaggcgctacaattttcggggcaattgttaaagaaagcacaacaatcagccctgtactcattgctgccaataccctagataccatcagtgttgcgaaattagggctgaaataggcgacaagattgctaaggaagaaaacaaataaagcaattagatataagcgcttccgctcaatcttcgcagtcaatgccaaaagcagcggcccagatactgcatatcccagcgcaaacacactgatcagctgtccggctgaaacaatggaaatgtctaaatcatttgcgatctgaggaagaattccccccacaattaactcaaccaatccgactgcaatcgtagaagctgcaagcaggaaaactttgaaattcataacaaactcctttacttaaatgttttgataaataaaaaaaatcctgattacaaaaaatgtcataaacaaattttgtaatcaggattttacggttcctggtagacaccctcaaaccatattattgaggttatacaagtgataatagctatttaattgattcgtttccgttgatgagtgtaccacattatgaatgaatcttccatagaaaaatttataaaacggtgaaccggaaaaaaatatgattatatttattttataaaagtatagacatttaaaattaaatgactataataatcaatgtaagcgttttaataacaggggggatagcagttgaaaaaaatattactcgcgtgcagttcaggaatgtctaccagtttattggtgacaaaaatgaaggaatacgcacagtctatcggtgaggaagcggagatttgggctgttggccaggataaagcaaaagaagacatgagaaaagcggatgccgttttgatcggtccgcaaatgagctttctgaaaagcgagctccaaaaagaagcagatcaatacaacattcaagttgaagtcattgacatgatggcctacggaatggcagatgggaaaaaagcgtatgagcaggcattgtccttaatggtgaatcaataatggaacagatgaaaatcacgaatttaacagacgagcaaatcagttttcagctaatcctgcacagcggaaatgcccgcagctgcatcatacaatcactgcgcgcctataaagaagggaaaaaggacgaggctgatgccctcattgccaaggcggagcaggatttatccgcggcccatgacattcactttcaaatgatacagaaggaatccggcggagaagcaacagctttttcattgctgcttatgcatgcagaggatcatctgatgtcaacattatccatgaaagaattagtgaaagagatgcttgatctctttaaaaccaagaatatataaaaaatcggggtggatagggtgttcgagaaaatcagccaattccttgttccaattgcagggaggttaaacaataaccgctatttgcaagtgttgcgtgatgcatttatgctggctttcccgctgacgatattcgggtccatttttgtcgtgttaacgaatttgccgtttctaaacaaaatcatgaacgcctcaatgcttacgtcgtttcagtctcatttcggcattgcctccacggcgacaatgggcattatgtctgtctttgttgtgttcgggataggctattacctgtcgaaaagctatcaggtcgaagctgtatttggcggagcgatcgctttggtttcctttttgctcttaacgccatttatcattcagccggaaacaggtgatgccattacaggggttatcccggtcgatcgtctcggtgcaaaagggatgtttcttgggatgattacggcatttctttctggcgaaatttacagaagaatcgttcaaaaaaacctgacaatcaaaatgccagccggcgttccgcctgctgtagcaaaatcattcgccgcacttattccggcttttatcacattgactgtatttttgctgattaacgtaatggtgactctgttttttaaaacaaatatgcacgacgtcatttatcatgcgattcaggctccgcttgtcggacttggaagcggtatcattccaacactgattgccgtgtttttcattcaaattctttggtttttcggactgcatggacagatcattatcaactccgtgatggacccgatttggaatacactgcaggtagaaaacctttctgcttacacggcgggaaaagaaatccctcatattatttcaaaaccgtttatggagatttatacagtagggatgggcggaacagggatgacgcttgcgattgtgtttaccattctcatattcatgaaaagcaggcagatgaagcaagtatcaaaacttggcctcgctcccggtatttttaacgtaaacgaaccgattatctttgggcttccgattgtcatgaatccgatcattattgtgccttgggtgctggcaccgatggttgttacgctcgtcacctatctggctatgtcagccgggctcgttccgcctccaactggtgtgacagtgccgtggacggttccattattcattaatggcatcatggcgacgaactcaatcatggggggcgtgatgcagcttatcaatctgctgattgtcttcgtgatctggtttccgttcctaaaagcaatggataaattaaatctggcaaaagaaaaagaacaggctgtgcaggagacagctgctcagcaaaatgataacagcataaaaatgtgacataaggggagagagacttggcacatacagaacaatatcgttttccaaaggatttttggtggggatcatccgcttcagcaacacaaatggagggtgccgccgacagagacggaaaaggccagaatatatgggattattggtttgaaaaagaaccgcatcgtttttttgatcatgtcggacccgcagacacatcccaattttacgacaactataaagaagatatcaggctgatgaaggaacttggccacaactcgttccggatgtcgatttcctggtcacgtttaataccaaacggaacgggcgagatcaacgataaagccgcagatttctataacaatgtcattgatgagctgatcgctaacggaattgaaccttttgtcaatttgtttcatttcgatatgccgatggcgcttcaaaaaatcggcggctgggtcaacagagagacggttgacgcgtatgaaaactatgcaagaacttgcttccgtttgtttggcggccgggtgaaaaaatggttcacgcataatgaaccaatcgttcccgtagaaggcggatacctatatgattttcattatccaaacaaggtcgattttaaagaggccgtccaggttggatttcatacgatgctatcaagtgcccgcgccattcaggcttacagggagatgaagcaggacggaaaaatcggcatcatcttaaatttgaccccttcatacccgagaagcagccatccggcggatgtgaaagccggggaaatcgcagacgcgttttttaacagatcttttttagacccatctgtcaaaggcgaatttcccaaagagctggttgacattttgaagcatgaaggctttatgcctgattacaacgctgaagatctcgacatcatcaaaaagaacacggttgacctgttgggagtgaattattaccagccgagacgtgtgaaagcgaaagaacatcttccgaatcccgacgctccttttttgccggacaggtattttgatccctacgtcatgccgggccgcaaaatgaatccgcatcgcggctgggagatctatgaaaaaggcgtttatgatattttgatcaatttaaaagaaaactacggcaacatcgagtgttttatctctgaaaacggtatgggggttgaaggtgaagagcgattcagggatgaacaaggcatcattcaggatgattaccggattgaatttataaaagagcacctcaaatggattcaccgcgccatacaggaaggctcgaacgtaaaaggctatcacttatggacgttcatggacaactggtcttggacaaatgcctataaaaaccgatacggatttgtatcagtcaatcttgagaaagacggagaaagaaccgtcaaaaagagcggaaaatggttcaaagaggttgctgagcatagcggtttctagattttcctaaaggtcaagatcttccggcaatcatcataacgaatagagatgacgaaaatccgcaacattgatgaaatagggaaaagaacttatgatatccgtaaaagcttatgtgatatcaaacagctgccggaggataccaatgaataaatacgaaatcattgcaaatgaaatgagaaatagaattaaaaataacgtatatccgatcgatcagcccattcctgatgaagtatctcttgcaaaagaatttaactcaagccgcatgacgatgaagagagccttggataatttagttgccgagggtctgctgtttagaaaacgaggccatggcacgtttattattcaatctgcaatacaggatgaccatgtccatgtagtcagcaatgagattctcggattgaccaacttgctgaaagataaaaaaatcaaaagcaaggtcattcagtttgaagtgcaatttcccactgaggaagtggccgcccatttgtctattgatcagaaaacaccggtttattatgtcgttcggctgcgaattgtagaaggtgaaccctatgtattagaaaaaacatatatgccgactcatttaataccgggcattaatgacgatgtccttcatgattcgatctacaatcatattacaaatgtgctgcagctcaaaatcgccggaacgcatcggaaaatcagagcctgcaaatctgatcatattgaccagcagcatctgggctgtaaacaggatgatccaattcttgaagtggaacatgtgggcttcttagataccgggattccatttgaatattccttttcacgtcatcggcatgacaagtttgttgtgacttctgtaaacatacggcgctgattgcggagacaacaaggaggccatctgcatgcttggcggtattgaagcaggcggcacaaagtttgtttgtgctgtcggtagagaagatggaacgatcattgacaggatagaattccccacaaagatgccggatgaaacgatagagaaagtaattcaatattttagccaattttcattacaggcaatcggcatcggctcctttggtcccgttgataacgataaaaccagtcaaacatacggtaccattacggccacgccgaaagcgggctggagacactatccctttttgcaaaccgttaagaacgaaatgaagatcccagtcggatttagtacagatgtcaacgctgcggcgctgggtgaattccttttcggtgaagcgaagggtcttgacagctgcctgtatataacgattggcactggcatcggagcgggggctattgtagaggggaggctccttcaggggctgtcacacccagagatgggccatatttatatccggaggcacccggatgacgtataccaagggaagtgcccttatcatggagattgctttgaaggcttagcttcaggccccgctatcgaagcccgctgggggaaaaaagccgcggatttatcagatatagcacaagtctgggaactggaagggtactatattgcccaagcactggctcagtatattttgatccttgcacctaaaaaaatcattcttggcggcggcgtcatgcaacagaaacaagtgttttcttatatctatcaatatgtaccaaaaatcatgaacagctacttagatttttctgaattatcagatgatataagtgattatattgtacctccacgtttaggcagtaacgccggaatcatcggcacgctagttttagcgcatcaggccttacaagcagaggcagcatccggggaggtgcgatcatgacgcatccattatttttagagcctgtctttaaagaaagactatggggagggacgaagcttcgtgacgcttttggctacgcaataccctcacaaaaaacaggtgagtgctgggccgtttctgcacatgcccatggctcgtcgtctgtaaaaaatggcccgctggcaggaaagacacttgatcaagtatggaaagatcatccagagatattcgggtttccggatggtaaggtgtttccgctgctggtaaagctgctggacgccaatatggatctctccgtgcaagtccatcctgatgatgattatgcaaaactgcacgaaaatggcgaccttggtaaaacggagtgctggtatatcattgattgcaaagatgacgccgaactaattttgggacatcatgcaagcacaaaggaagagttcaaacaacgaatagaaagcggtgattggaacgggctgctgaggcgaatcaaaatcaagccaggagatttcttttatgtgccaagcggtacactccatgctttatgtaagggaacccttgtccttgaaatccagcaaaactctgatacaacatatcgcgtatacgattatgaccgctgtaatgaccagggccaaaaaagaactcttcatatagaaaaagccatggaagtcataacgataccgcatatcgataaagtgcatacaccggaagtaaaagaagttggtaacgctgagatcattgtttatgtgcaatcagattatttctcagtgtacaaatggaagattagcggccgagctgcttttccttcatatcaaacctatttgctggggagtgttctgagcggatcaggacgaatcataaataatggtattcagtatgaatgcaatgcaggctcacactttattctgcctgcgcattttggagaatttacaatagaaggaacatgtgaattcatgatatctcatccttaatgaatgggggagttgcatttgtttaagaaacatacgatctctttgctcattatatttttacttgcgtctgctgttttagcaaaaccaattgaagcgcatactgtgtcgcctgtgaatcctaatgcccagcagacaacaaaaacagtgatgaactggcttgcgcacctgccgaaccgaacggaaaacagagtcctttccggagcgttcggaggttacagccatgacacattttctatggctgaggctgatagaatccgaagcgccaccgggcaatcgcctgctatttatggctgcgattatgccagaggatggcttgaaacagcaaatattgaagattcaatagatgtaagctgcaacggcgatttaatgtcgtattggaaaaatggcggaattccgcaaatcagtttgcacctggcgaaccctgcttttcagtcagggcattttaaaacaccgattacaaatgatcagtataaaaaaatactagattcttcaacagtagaaggaaagcggctaaatgccatgctcagcaaaattgctgacggacttcaagagttggagaaccaaggtgtgcctgttctgttcaggccgctgcatgaaatgaacggcgaatggttttggtggggactcacatcatataaccaaaaggataatgaaagaatctctctatataaacagctctacaagaaaatctatcattatatgaccgacacaagaggacttgatcatttgatttgggtttactctcccgacgccaaccgagattttaaaactgatttttacccgggcgcgtcttacgtggatattgtcggattagatgcgtattttcaagatgcctactcgatcaatggatacgatcagctaacagcgcttaataaaccatttgcttttacagaagtcggcccgcaaacagcaaacggcagcttcgattacagcctgttcatcaatgcaataaaacaaaaatatcctaaaaccatttactttctggcatggaatgatgaatggagcgcagcagtaaacaagggtgcttcagctttatatcatgacagctggacactcaacaagggagaaatatggaatggtgattctttaacgccaatcgttgagtgaatccgtaatgtcacaattaagaaggtgctcaagaagtttcttgagcaccttcccactggattaagcattcatatcgcctaacccaggactgtgttcatttggtatttcaggaagcactggtacgggaaaccctgccggaggatctattacttgtaactctccgccatttcggcttggagatttcccttgatagatttcactgattctcgtttcatccaacctaaagttaaaatgtgtattatggtagcctaattcgacatactttctgcactcaggatatttattaatgtcataattcggcacagggagcagcttcgcccattcaacgcccaatgtctcgagcgctttcgcgaatgcattctggtgagcattgtcgcgtacaatcagaaaagcaagtgtttcgcggaacgtctgattagagctcatttcataaattcttgttttttgcagcacacctgtcgactcaagaagcaggttatccagcaggtcagtaattaagtttccgtggttatacacccacgacccgttccacggattgccccctgcatcaacaggaagggaactttgcgctccaataatataatgatgaggattagcatgtttaaccgcttcatcaagtggcgcttgatctgtaccttgactgccgacaccttcaccgcctgattcatctaataaagcattgattgtgttttgaaccagttcaacgtgggcaatctcctctaaaaaaatgccgcgaagcagatcgcggtactgtttctgctttcctctgaaattagagctttggaaaaaaactgcatcattgtacgcatttctccgtaatgaccgcctaatatctcctgcaggaccttagcagctgccgggtctggcttgtccggtttaatgatattaatcagttcctctttgtagtaatacataacacgcctcatttcttcttaagagattttcttatattatttgtaagatgagataaaatatatacatgataagcatgggaaggcgtgaaagaagaaaataaaaaaatacaggaaaagtgttgaccaaataaaacaggcatggtatattattaaacgtcgctgatgaacagcgtgaaacaaaacagaaaaacaaaaaagttttcctaaggtgtttacaagattttaaaaatgtgtataataagaaaagtcgaattgaaaaagattcgaaaaaacattaaaaaacttcttgacttcaacatcaaatgatagtatgatagttaagtcgctcaataagcgcccgtagctcaattggatagagcgtttgactacggatcaaaaggttaggggttcgactcctctcgggcgcgccatataagataccacgcgggtgtagtttagtggtaaaacctcagccttccaagctgatgtcgtgagttcgattctcatcacccgctccattattgaatgatctttgaaaactaaacaagacaaaacgtacctgttaattcagtttttgaaaatcgcacagcgatgtgcgtagtcagtcaaactagggcctgcacgatgcaggtcacacaggtgtcaccgcgggatgcggtggacttaacctgtgatccatttatcggagagtttgatcctggctcaggacgaacgctggcggcgtgcctaatacatgcaagtcgagcgatgtggaaatcgcgcaccgttcgcttttctcccaacatcctgaactgcgccgcgctggcgataaccgtcgccgctgggctgatttagcggggctctgatatgtggaatatctggccgtttggccgtaagtctgaaccctcagagcagcgcagcatgaccattgatgaatttctggcgatggcagggattccaaataccggatcaggcgagtacgtgtctgcgggtactgcggaatctctgccggcggtcatgaacgccgtatcagttatcagtgaggcggtggcaacaatgccctgctatctctaccgtgtgcgcaacgataacgggcgagaggcgcgggaatggctgagcaatcacccggtggattttctgctgaacgagcagccgaacgactgccagacaccttaccagtttaaacgcacgatgatgcgccactgcctgctgaacggtaacgcctatgcggtgatccagtggggccgcgacggccagccgcaatccctgcacccgtatgcgccgggggcggttgtacctgagcgtatcggccagcataagtacaaatacactgttactgagccgtttagcggggctgtgcgcacctacttgcaagaagagatcctgcacctgcgttactcgaccgatgatggttttctggggcgctcgccgatcaccacctgccgtgaggcgctggggttaggtctggcccagcagcgccacggtgccagcattatgaaagatggcatgatggcggctggcgtggttactactgccgaatggctcgacagcgtgaagggaaaacaggctctggacgcactggagcgctacaaaggtgccagaaacgccgggaaaacgccgatccttgaaggcggcatggactacaagcagcttggcatgagcaatcaggatgccgaatggctggcctcccgtcgcttcaccattgaagacattgcccgcatgttcaatgtgtcgcctattttcctccaggaatacagcaacagcacctacagcaacttcagcgaagcgagccgcgcatttctcaccatgacaatgcgcccgtggctggcgaacttcgaacagcaaatcaaatctgcgctgctggtggcctctccggttccgggaacccgctatcaggtggagtttgactccgctgaccttctccgcgccacgccaaccgaacgctacgcaacttatgagcgcggcattaagaacgggattatgaacccgaacgaagcccgtgagcgtgaggggatgccgccgcgtgaaggtggtgacgagtttagccaggcatggaagcagcagatcgaagtaaatagcgataaagagggtaaatctgatgattaatcaacatttccttcacgagtgttttgaatattcaaacggtgctttgatctggaaagaaaggccagcgcatcattttaaatccaagagagggtttaacagtttcaatacacaattcgctggaaaaattgcagggcggtgtaattgtcgtggttactggcaggttggcttaagtggtcatcgcctgcttaatcatcgggttatctggatgatgtttcatggtgatattccgcaaaattacgaaattgaccatgtgaatcacgttaagggcgataaccgtatagaaaaccttcgattagttacccatatggaaaatgggaaaaatcagtctgccggaaaaaataataagtctggatttaatggcgtactgaaaagtaaagagggtaatcgatggagggcgtttatttcggtaaatcgcaaaaaaattcaccttggttcatttcttaccaaacaggcggcaattcaggcgagaaagtctgcggaaattaaatatggctatcacgctaaccacggaggcctggcatgagagccggaaagatgaaacgccgcgttacctttcaaaagtctgaatctcaccgcgacccgactggtcaggttatctatgaatgggctgaccttgccaccgtctgggctgaaattcgtgctatcagcgggcgtgagcgcatgtcttccggggcgctttactctgaggccactgtgcgaatctggacgcgctaccgcgacgatatcaccaccgcaaaccgcattctgtaccgttcgccaaacgtccgggggcaggtttacggcatcgtggccgtaattcctgatgtggatcacacccggcttgagctgctgtgcaagggaggcatttttaatgagtgagttaatcggtctcgaagaagcaaagctgcattgccgtattgatgatgattatgaagacacactgatacaggcgtacatcgaagctgcgctggaggtctgccagaagcatatcggcaagcgatttgataacggtctggagttcaccccggctatcaagatcggctgtctgatgtacgtctctcagctgtacgagtaccgcacgatgattggtgacaccgacgccaaagagataccgatggctgtctctgcgttgtggtctgtctaccgcgatgtgggggtgtactgatgccgtggcaaccactacgccggtgcacagagccgggatgcaataaacgggtgaagtctggcaagtgcgacgagcacaagcgggaagcgtggcgggcagaggatgccagacgcggccaccgccgcgcgcgtggttactcagcctcatgggagaagtaccgtgctcagtatctgaaacgtcagccgctatgtgtcgagtgccagaagctgggcctctacgttcctgcaaagattgtcgatcacatcatccctatcgacggcggtgatgatgttctgttctggcctgagtggaatcaccagccgttatgccagacacatcataaccagaagaccacacagcaagatccaaccaccaaagcgaagcgcaaagcagggctgtaccgtgagcaggaagagcgtgcagcccatcgcaatgactggatgtatgaggctgacaatgactgagcaggaacagcagcggctgataagtgggctgataaagcagcgcgaggcatggcaaccatccagacagagagcgcacacgaagcccgtagcaaagcgcatgagccagcgtgaccgggagcttatggaatgcttccgcaaccgctgacaggccgcaaggacggggtgggggaggttttcaggacaaaaccccagctgcaaggcaccgcctgccccctcaaatttttacgcacggtgatttttttgaaaataaaacagacaggaaaacagtaagttatggcaagaccacccaaaccgcccgcctaccttgatgaaatcgcggcgcagcagtggaaagcaaaggcgaagcagctggcggagcgtggggatctgacgcctgccgactggaacaaccttgagctgtactgcgtcaattactcgatgtaccgcaaagccgtggaagaccttgccacgcggggattcagcatagtgaacagccagggcggtgagagccgtaacccggcactgagcgcaaaagctgatgccgaaaaaattctcataaaaatgtcgtcgctgctgggctttgatccggtaagccgtcgccgtaatccggtagaaacggaagaggaggacgagcttgaccgtctggaatgattacgcaaacgccattaaatccggtgaaattccggcctgtaagcgcgtaaaacaggccgtggaaaggtacttttcagacctgaatgacccccgttatgagttcgatacggcgaccgtagagcggtttattgcgttctcgcggctctgtccacacgtcaaagggccgttgcgcggtcagccaattgagctggagccgtggcagcagttcgcctttgctaacctgctgggctttaaagtcagggagtcagggcgccggaagtacagcagcgcctttattgaagtgccgcgcaagaatgccaaatccaccgtggccgccatgctggcaaactggtttctggtgatggagaagggccagcaggatatctacacggcggcggtgagccgggatcaggcccgaatcgtgttcgacgatgcccgccagatgtgcctgctgtcaaaaccgctgaaaaagcgcgtcaatattcaggcccacaaggtcattttcccgaagagcaacagcctgttaaagccgctggcggcgaaagcggccaccattgaggggactaaccccagcctggcgattgtcgatgagtaccaccttcacccggataacggcgtttattccgcgcttgagctgggtatgggggcacgtccggaggcgattttgttcgccatcacgaccgccgggagtaacgttgtctccgcctgtaagcagcattatgactactgctgtcagattctggccggggaagagagcaacgattcgctttttgtcctgatctacgagctggacgacgaaagcgaggttgagcagccggaaatgtggatcaaggctaaccctaacctgcatgtgtccgttgatgcggcgaaactggaatccactatccagaaagcgcggggcataccgtcgcagtgggtcgaaatgctgaccaaacgtttcaatatctggtgtcagggctccacgccatggatgggtgccggcgcatgggatgcctgtgcgctcgactataccgaagacgatctgatcggaatggagtgctacgccggatttgacctgtcctctaccagcgacattaccagcgtgagttacgctttcccgttcgacagggagatccgcctgctgacccgccattatctgccggaagcgcagctgcttaacgtcgccaacaaaaaccgcgccatctaccgccagtgggtgaaagcgggttggatacgcaccacgcccggtgactgcatcgactatgaccgcatccgtgacgatattctgcgcgatgctgaaaccttcaatatccggctggtgggtttcgatacgtggaacgccacgcatctgcgcactcagctgcagggcgcggggctcgatgttgagcctttcccgcaaacctatctcaagttcagtccggtggcgaaatccttcgaggtgttcgttaaccgtaaggtggtgcgccaccgcggcgatccggttctggcctgggcgattggtaacgtggtgatggagtccgacgctaacgccaacattaagcccaacaagaagaaatcctccaacaagatagacccggctgtatccgcgctgatggcgttcggtaccttccaggctgagcacgaggattttgctttcgatatgagcgacagccacaaacaacggctggcgacatttaacggtatctgacaggagtagaatgatgaatacagctaataatgaaacacttgcgaccatccgtatgtttggcccgctcggcaaaaccttcggtagaactcaccagcgcctggtgcggactacgcatgaggctttccgggctctggccgtaacgattcccggattcgaaaaatacatgaatacaagcagggctcgcggtttaacgtacgcgatttatgtcgggaaaaagaacattggagcagatgacctggaatttccgaacaatgggcgcgagattcatatcgtgccggtggtaattggaagtaaaaaagcagggatgttacaaactattctcggcgcggtactggtggtggtaggggcaattggggttacggttggtcaggcatggggcggtggcacgtggggccccgttgcctggaaactcggcgcggctatgattgcgggcggtgttgtgcaattactttctccacaacctaccggtcttgcaagcaaacaaagtgcggataataaggcttcatacgcatttggcggcgttacgaatactgctgcgcagggttatccggtaccattgctatatggaaagcgccgtatcggcggtgcaatcatatcggcgggtatctatgtggaggatcagctttgacaaatcaggtgcaactctggccagaaggtgaggtatttacccgagaggtattgataccgacgaaatacgagccgttgccggtggaggtaacttacatcgttcctcctttcgataacgttgtggagacatggcagaacagggacccggcgaaggcttacgctctgtttagacagttcattgttgactgggatcagcaggacaaactcaccgacgaaatacttatgtgctttctgacagcttaccctggtacagatgaagctatttttgccggttggtgtgagcatatgaaggcgcaactggagaaaaacaaagagtcatttatccattcgccaaacactatcaattaagcctgcatactcgttatacggttggactaaaacattaagtaggggatgacgtgagaaagaaaattaccttgttcgtagcatcaattttattggctggttgttcagttgatacgattacaagcaaacctccaattttcactggtaaaagcccaaaaaaaccagctgaggtggttcgctgtttagcgccaaaaatgtcagatctgaacccatcagcagtagcaatggaaactgaaacgggctacagaatagtggtatcagtttctgacgtaggcgcttcagttgttgcccttgtgaatgctgatggtgagggctcagaggtaaaaatgcacgcttttacagccgggtacggaaacccttggggtaaaatggcgatgtcctgcctataaaattgactgcacctgtaaggtacctctcaactagcccctgatggggctttttttattcctttaaggaatgctgtatactcgcccgctttctatcgtactcatgctatcgcttcttttcggatttgtgcgataatccgtatatcaatcggtgtatcaataatcactggttagcatggtgtgaaatggctattaactgatattaatcagtgagatataaagattatgaaacatattgttgaagtgatgatcccggaagccgagatcaaagcgcgtatcgccgaactgggtcgtcaaatcaccgaacattacaaggacagcggcagcgaaatggtgctggtcggtctgttgcgcggctctttcatgttcatggcagacctgtgccgtgaggtgcatgtgccccatgaggtcgattttatgaccgcctccagctacggtagcggcatgtccaccacccgtgatgtgaaaatcctgaaagatctggatgaagatattcgtggcaaagatgtgttgatcgttgaggacatcatcgactccggcaacacgctgtcaaaagtgcgcgagatcctgagcctgcgtgagccaaaatcgctggcgatttgcaccctgctggataagcctgaccgccgtgaagtgcaggtgccggtggagttcgtcggtttctctatcccggacgagttcgtcgtcggttacggtattgactacgcacagcgttatcgtcatctgccgtatgttgggaaagtggtattgctggacgagtaattgcggtttgttgcccggtggcgctgcgcttaccgggcctacgaatgggcacatgtaggccgggtaaggcgcagccgccacccggctttgtttatttatggtttacgtgcttaagctgaaggttggcaattcccgaacggtaacgctgctccagcgtttcgcggttggtggcggtcacttctaggttgcgcagcagaccgtcatgaataccgtacgcccagccgtggatcgagaccttctgcccgcgcttccacgccgattgcatgatcgttgagtggcccaggttatacacctgctccatcacgttgagttcgcacagggtatccatgcggcgctcctgcggcatttcgcccagcagtgagctatgtttgaaccagatatcgcggatgtggagcagccagttatcaatgagccccagctccgtgttttcaaccgccgcctgcacaccgccgcagccgtagtggccgcagatgatgatgtgctcgacttgcagaacgtcaacggcatactgaacaacagaaagacagttgagatcggtgtgaatcaccaggttggcaacgttgcggtgaacaaacagttcgccgggctcgaggccggtcaggcgctccgccggtacgcggctgtcggagcatccaatccagagaaagcgtgggttttgcgcctgcgcgagttttccaaaaaatccggggtcttcctccaccagcatttttgaccatagtgcattgttgctgatgagtgtatctatgttgttcatggaggttagcgacctgtaaccgagtaattgcgttgcgctactatagggtaacccgacttttaatgaaaccacacaacgtgtgtcagaactgaaggtaagttaatttcatggcaattgcactggagcttgagcagcttaaaaaaacctatccgggcggcgttcaggcgctgcgcggaatagatcttaaagtagaggccggtgatttttacgcgcttctggggccgaacggggcggggaaatcgactaccatcggcatcattagctcgctggtgaacaaaacctccggccgcgtcagcgtgttcggatacgacctgcaaaaagatgtggtcaacgccaagcgccagctgggtctggtaccgcaggaattcaacttcaacccgtttgagacggtgcagcagatcgtcgttaaccaggcgggttattacggcgttgagcgtaaagaggccctggagcggagcgaaaaatacctcaagcagctcgatctgtgggaaaagcgtaacgaacgcgcccggatgttatccggcgggatgaagcgccgccttatgattgcccgtgcgctgatgcacgagccaaagctgctgatcctcgatgagccgacggcgggcgtagacattgagctgcgccgctccatgtggggcttcctgaaagacctcaatgacaaaggcaccaccatcattctgactacccactacctggaagaggcggaaatgctgtgccgcaacatcggcatcattcagcacggcgagctggtggaaaacacctcgatgaagaacctgctctccaagctgaaatcagaaacctttattctcgatctggcggcaaagagcccgctaccgaagcttgaagggtaccagtatcgtctggtggatacctcgacgctggaagtggaagtgctgcgcgagcaggggattaacagcgtgttctcccagctgagcgcgcagggtattcaggttttaagtatgcgtaacaaagcgaaccgactggaagagctgtttgtctctctggtgcaggataaacaaggagacaaggcatgacgcatctttactgggtcgcgctgaaaagtatctgggcgaaagagattaaccgttttatgcgcatctgggtgcaaaccctggtgccgccagtcatcacgatgacgctctatttcatcatcttcggtaacctgattggttcccggattggtgagatgcacggctttacctatatgcagtttatcgtgcctggcctgatcatgatggcggtgatcaccaacgcctatgccaacgtggcgtcgtcctttttcagcgccaagttccagcgcaatatcgaggaactgctggtggcaccggtgccaacgcatgtgatcattgccggttacgtcggtggcggcgtggcgcgcggtctgtgtgttgggatcctggtgacggccatctcgctgttcttcgtgccgttccaggtgcactcctggcttttcgtggccctgaccctgctcctgacggcgatcctcttctcgctggccggtctgctgaacgccgtgtttgccaaaacgtttgacgacatcagcctgatcccgaccttcgtgctgacgccgctgacctatctcggcggggtgttctactccctgacactgctgccgccgttctggcaggcgctgtcgcacctgaacccgatcgtctacatgatcagcggtttccgctttggcttcctcggcatcacagatgtgccgctgtttaccacagtggcggtgctggtggtgttcatcatcgtcttctacctgctgtgctggtatctgatccagcgcggacgcggtctgcgcagctagccctcagcccggcgacattctgtctgccgggcactttctttgacagttatcaccgaaagctaaccttcactccgctaaactacttgcctgctaaggagagagttatgctgggatgggttatcacctgccacgatgaacgggcgcaggacatgctgctgaagctggaagccaggtttggtccgctgccacagtgtcgcgcggttaactactggcgcggcttgagtaccaacatgcttggccggatgatgtgcgatgcccttcatgaaaccgacaccggagatggcgtgatttttcttaccgataaatccggcgcggcgccgtaccgtgctgcggccctgatgagccataagcacgactgctgcgaggtgatctccggtattagctttccactgcttgaaatgatgtatccccatcgcgagaccttaaccagcgcagcgttccgtaacgctatcgtttcgctgggtaccccgggcgtcagcagcttgtggcatcaacagcaaaaaaatcctccctttgtcctgctgcatgacctgtataagaattaaacattggtattgatgtcgcttttgctacaatggcgtaagtatttccgcttcgaataagaacctcatgttcacgcgtattgttttcctgctattgatgttcgtgtccggcactgtttctgccagtttattaagtcagcaaagactgcctgctcaatatatgcaaacgaccgaagatgcggcgatttgggcgcagatcggcaacagcgtcattaacgttggcaacgtgcgggcagggcagatcctcgcggtggtgcctgcggcggcggactactatgaatttcgcttcggatttggcacgggctttatcgacaaggggcatctggagccggttcagggcaaacagcgcgtcgaggatggcctgggggatttgaataaaccgctgagcaatcaaaacctgataacgtggaaagacacgcccgtttataacgccccgaacaacggcagcgcacccttcggcaccttaagcgccaatcttcgctatccgatcctgaacaaacttaaagaccgtttaaaccagacctggtttcagatccgcatcggtaatcgtctggcgtggatcagcagcctggatgcgcaggaagataacggccttcctgttctgacctaccatcatattttgcgtgatgaagaaaacacgcgctttcgacatacgtccacaacgaccagcgtacgtgcgtttaataaccagatggcatggcttcgcgatcagggctataccaccctgacgatgtaccagctggaagggtacgtgcgtaacaaaatgaacctgcctgcgaaatcggtggtgataacctttgacgatggcctgaaatctgtcagccgctatgcttatcctgtgctgaaagagtacggcttcaaggctaccgcgtttattatctcttcccgcataaaaggccatccgcagaagtgggatcctaaatccctgcagtttatgagcgtgcaggagattaaggggattcaggatgtgttcgatattcagtctcatacccacttcctgcaccgcgtggatgccaataagcatccgattttactgagccgcagctatcacgtgattttgtttgattttgaacgctcgcgtcgcgcgctggcgcagtttaacccgcgcgtgctgtatgtctcttaccccttcggcggctacgacaataaagcgataaaggcggcgaatgatgccggcttccatctggcggtgacgacggtgaaaggaaaggtgaagccgggggataatccgttcttactgaaacgcctgtacatcttaagaacggattcgctggagacgatgtcgcggctgatcagcaatcagccgcaggggtagtgcttatgcaacctgaaccggaatcgcctttgcggtgcgcttcatttcattctcgccttcgaagtaggcgactttaggctgccagcggcgcgcttcttcgtcagacatcatcacgaagctggcgatgatcacgatatcacccacgtccgcgcagtgcgcggctgcgccgttaacggagatgattttggacccgcgctcggcggcaatcgcgtaggtagagaagcgtttgccgttgttcacgttccagatatcaatcgcttcgttttcgaggatacctgctgcatcaaggaaatcctgatcaatggcgcaggagccttcatagtgcaggtcggcctgcgtgactttcacacggtgaagcttaccttgcagcattttgcgaatcattacgtttacctatcattatcaggggtgaagggaactacgccagctcaaccactttattgtcgatcagacgcgcctgacctagccaagccgccaccaggatgactgcgcgcttgctgttctgggttaattccagcagcgtatcagcatcacgaatttgtacgtcgtcagcacgaaggcctttatcgttaagcgcctgctcggcaagggcgataatctcttctgctgttaactcttttgccagcatctgctctgccatggtattcatgaccttgcttaagcccggcgcgattttacgttgttcggcagtcaggtagccatttcgcgagctgagtgccagaccgtctttggcgcgtacaatcggtacgccgacaatctcgatatcgtaacccatatccgcaaccatcttgcggatcagcgccagctgctggaaatctttctcgccaaagcaggctacgtccggctgtaccaggttgaacagcttgctgacgatggtggaaacgccgcggaaatggcccgggcggctcgcgccttcgagcatggtggaaatgcccgggacgtcaacgtaggttgcctcttcggtaccctgcgggtaaacatccgccggtgcaggtgagaaaacgatatccgcgtggcgttttttgagcttctcgcaatcttcctgcagggtacgcgggtagcgtgccagatcgtctgcgcggtcaaactgcatggggttcacgaagatactgaccaccacgatatctgcccgtgcacgggcttcgtcgacgagcttcatgtggccgtcatgcagattgcccatggtcgggaccagtgcgatacgtttaccttcctgtcgcgcgcggcggatatgctggcgaagcagcggcagggtttcaatgattagcacaacgagactccttaatggaaactgtgttcttcacccgggtaaacaccggattcaacgtcggcaatatactgcctgaccgcagcgcgcatgtcgcccgcttcggcgaggaaatttttggcaaatttcgggatgtgtccgccggtgataccgaaggcgtcgtgcatcaccagaatctgaccgtcggtgacgttgcctgcaccaataccaatcaccggaatggacagcgcgtcggtgatgcgtttcgccagctcaaccggcacgcactccagcaccagcagctgggcacctgcggcttccagcgccagggcatcatccagcagcgtctgggcggcatcgccacggccctgcaccttatagccgccaaagatattgacggactgcggcgtcaggcctaaatgcccgcacactggcacggcgcgctcagtgagcctcttcaccgtatccacaagccaggcgccgccttcaattttgaccatattggcaccggcacgcatcactgccgccgcgttttcgaatgcctgttccggcgtggcataggccataaacggcagatcggaaagcagcaggcaggctggggcgccacggcgcacggcgcgggtatggtaagcgatatcctcaaccgttaccggcagggtggaatcatgtccttgtaccgtcatccctaacgagtccccgaccagcatgacgttgatcccctcttcggcaaacagtttggcgaagctgtagtcatacgcggtgatggtggcgaagcgttttttttcctgtttgcatttctgcagtaaggagatggtggttggtttcatactgtttcctgatagcccaaaagcgaatctttgcgcattctaacagtaacattcgagggaacaatgattttaggtaaacgattaaccataaatattttatggttaattgccaaaaaaacagccttaccagcgggcgggtttctccgcaccgagactgttgagaacggcctttagcgagagcccgtcagggaaggtaagggaaggggcaacttcatacagtggccagagcataaacccgcgatttttcatgtcgtaatgcggaacggtgagacgttcagtgttaatcgtctcgtgaccaaacagcataatgtcgaggtcgagcgtgcgggggccccagcgttcagctttgcgcacgcggccctgctgaagctcaatacgctgggtattgtccagcagcgcttcgggatccagctcagtctcaagaaccacggcggcgttgaggtagtctggctgatcctgcggccccagcggcggggtgcgatagaacgaggagaccgccacgatgcggctttgcgggatctcacccagcgcctctacggcagcattcacctgctccagcggtgaggctaaattgctgccgatggcgatatacgcgagggtcatgctgtcccttcacgacgcggcgcgcgtttgcgcgggcgacgatgacggcgacgcggttccggctcttcatccagcccggtcagcatatctttctgctctggcggggcggagacctggaattcagcccaccactgcgccagacgctgcagctcctggttgcgttcaatttcagcgcgcagcgacaggagatcgaaggcggcacggaacttaggatgctccatcagcttccaggcgcgtttgccctgacgacgtgacatgcgcagctgaagctgccagatgtcgcgcaccagagtggtaatacgtttcggaatggcgagcgtgcggcagccttcgtccagcacgtcgttggcggccagcgcgaacgcatcgtaataggcgagcccgctctcctgggtaatgcgctgggccgtttccagcagcggataccagaacatcgcggcaaacaggaacgccgggttcacgcgcatgtcgttgcgaatgcgggtatcggtattcttcagcacctgcgcaatcatccgttccattgggctgtcaccgttttcggtgaagtagcgggtaatggtcgggaacagcggctggaacaggttgtattcgcgcagaagattataggtttcaaaaccgtggccggcctgcagcagcttcagcgcttcttcgaacaggcgagcaggcggcacgtcgttaatcagcgtcgccagacgcgggatcggctcggccgtttccgggctgatgcgcatattgagcttggcggcgaaacgcacggcgcgcagcatacgcacgggatcttcacggtagcgcgtttccggcgtgccgatcaggcggatcagaccttctttcaggtcctgcatgccgccgacgtaatcgcgcacggtgaaatccgccacgctgtaatagaggctgttgatggtgaagtcgcgacgctgggcatcttcttcgatagagccgaagatgttgtcgcgcagcagcataccgttctggccgcgctgcgacgtggtgcgatcggatgcgcccgcttcgtggtggccgcggaaggtcgccacttcgataatttccggcccaaacatcacgtgagccagacggaagcggcggccaacgagacgacagttgcggaataatttgcgcacctgctcaggcgtggcgctggtcgtcacgtcgaaatctttcggttttttgcccagcagtaaatcacgcaccccaccgccgacgagataggcctcgtagcccgctttattcagacgatagagtaccttgagggcattttcactgatatctttgcgggaaatagagtgctgctcacgcggaataaccgacatgtgtggctgtgcaatagcatcattcgccatgctctcttcgcggcttagcactttacggcaaaaattagcgactcgggtaaaaatggtacacctcgtagtgtgttttgttatgaaaaaagcggctaatcatagctcagcgcaacgcatttgagaatgctggatttttggcacagccctgagcgtccagttggcgatggccattttcagcagttcgtcaatacgcagatcctgccattcgttggttacattctggttgagaaaacgcagcgcgtcgatcaaaacaggacgcggatcgccgtctggcagggccggggcgtggttctgctttgataattttaagccctgcgcattaaccgccagcggcagatgaatgtagtccggtgccgtccagccaaactggtgatacagcgagatttgccgtacggtgggctcgaccagatccgccccgcgcacaatttccgtcacgccctggaaatgatcgtccaccaccacggccaggttgtaggcgaacaggccatcgcgacggtgaataataaaatcctcacgcgccagacgttcatcggcatgaatctcaccggagagtaaatcgtgaaagcgcgtcaccggtgagcgctgcagtattcgcacggcggcattttcaggaccgttgttcaacctgcggcagtggccgtcatagacgccgcctgcgctctggatacgcgcgcgggtgcaggtgcagttataggaaagcccctgagcgcgaagccaggccagacgttcccgatacgcctcgtgacgtgtcgactgccacagaacctcgtcatcccagtgaagaccgtaatgttccagctgacgcagaatcgtctctgctgcaccgggaacttcacgcggagggtcaatatcttcaatgcggacgagccattttccctgacgggcgcgagcctgcaggtagctgccgagcgcggcaattaatgagccgaagtgtaattcaccggaaggagatggcgcgaagcgcccaatatagtgtgattcagacatatcaacagtaacaaggcgggagagactcccgcctttggagtgtgtaaacagcgctggtgttaaccggccatctgtttttcgcggatttcggccagcgttttgcagtcgatgcacagatcggcggttggacgcgcttccaggcgacgaatgccaatttcaacaccgcaggattcgcagtagccaaaatcttcgtcttcgacttttttcagcgttttctcgatctttttgatcagtttgcgttcgcggtcacggttacgcagttcgaggctgaactcttcttcctgagcggcacggtctaccggatccgggaagttagcagcttcatcctgcatatgagtaacggtgcgatcgacttcatccctgagttgattacgccatgcttcaagaatacgcttgaagtgcgacagctgggcttcgttcatatactcttcgcccggtttctcttgatacggctccaccccagcgatggcgagaatactcagggacgatgttttacggttttgcccttcttgcatgttgcttctccttaacacgcactatcgatccccgtgttgggggaaaaatcaggtcgctataaatagcagatgcttttccgtatggcaattatctaaacgtaacacttgacaagcctgtgaggaaaagcgtatttgcgcacgcggccagaacacttaatagtcaatcgtctaatcccttataagacaatgggaagagaggatctcagagtcatattatcggcagaaagttccgctttataagcgaaaacctctaccccctgcttttgtgcctcattcaacaattgcgcgtatttaggatcaatatggcgggcaggggagaaacgttcaatggctgaatgcaataccgcaaacagcaatacggcgcgtttgcccgccgccgcaacactcattagctctcgcagatgcttctggccacgtagcgttaccgcatccgggaagtaaccattttcctgttccgctaacgtcactgattttacttcaatatagcactccggcctgtcttccgcctgtaacatgaagtcaattctgctgccttcatcgccatatttcacttcgcttttatgcgtgccataaccaaccagttcgggaataacgccatgggtcagcgcttccttaactaactgattggcgcgcagggtattaacgcaaataaatgccccgttttgggtttcggtcatttcccaggtatgagcatatttgcgtttagtattttctgatgtggaataccagaccctgtcacccggcgtcgcacagcccgtcatggcaccggtattggggcagtgcagggtgagctgttcgccttctggcgtgattacatcggcgaggaagcgtttgtagcgttggacaagcgtagcgtgctgcaggggaggactaaacttcatcagaattcctttcggtgtcgcccagcgtccagcgctgtagcggcgtatagcgggtgcgtccctgaataaaggcggattcataaagcgcgaatgtgttgacctgaaaggcccagtgaaaacccggcggcgggatggcaacggcctgaccggcatcgcgcagcagggtgatgtgcggatgaaacggctgtgggctttgataacagccgctgcgcgccgcctgcgcgcgcagcatgttcgccagctgtaataatccgcgcggaggctgtcgcgtacccagccagaccacgcgcgaacgcagccactggcccgcgtcgtcgaggtgcagcgtaaattccggctgggcaatacgccctgccagggcggctagcgcccgctgtttttcggcactgacgtcgcccaaaaaggccagcgtcaggtgcaggttggccgccgcgacagggcgaccggcctccggcgagaagtggtcagcgcgccagcgaacaatttgacgctgtaagggggggggcaattcaatggcaaaaaacagccgtttcgactcaggcatacggaggactcggtaatgatatgcgccgatgctacaatgtacgccgacgaatgttaaccctctggagctgttagtgtcctcattgccggtcgccgttgttcttcctgaccttctcgctgccttacgccattccccgcaggttttgctgaatgccccgacgggggcgggtaagtccacctggctgccgctgcagattctgaaagaggggaacatcagcgggaaaattatcctgctggagccgcgcaggctggccgcgcgcaacgtggcgcagcgcctggcggaactgctgaaagaaaaaccgggcgaaacggtagggtacaggatgcgcgccgagacctgcgtgggtccgacaacgcgccttgaggtggtcaccgagggcattctcacccgcatgctgcaaaacgatccggagctgaccggcgtcgggctggtgatcctggatgaatttcacgagcgcagcctgcaggcggatctggcccttgcgctgttgctggacgttcagcagggactgcgtgacgatctccggctgctgataatgtcggccacgctgaacaatgcgcggctacggcaggcgctacccgatgcgcctgttatcagctctgaagggcgggcgtttcctgttgaacgccgctatcaaccgcttccctcccatcagcgttttgacgaagcggtcgccattgccaccgcagaactgctgcgtcaggaacccggctcgctgctgctgtttttgccgggcgtcggggagatccagcgcgtgcaggagcagctttcctctcgcgtaggcggtgatgtactgctctgcccgctctacggcgcgctgtcgctgcaggagcagcgtaaagctatccttcctgccccggttggacagcgcaaggtggtactggcaaccaatattgctgaaaccagtttgaccatcgaaggtattcgcctggtggtcgatagcgcacaggagagggtggcaagctttgacccgcgcaccgggctgactaaactcctgacgcagcgcatcagccaggcatcaatggtgcagcgcgcgggccgcgcggggcgacttgagccgggtatctgcctgcatttgaccagcgcagagcaggcggaacgcgcggcgcagcaaagcacaccggaaattttacaaagcgatttgtctggcctggtgatggatctgctgcagtggggctgccctgatcctggacagcttacctggcttgattccccgccagccgtgaacctcaccgcagcgcgcaacctgttgacccagcttggtgcgctggaaggcgaacgtctgacggtacgcggccagaaaatggcggcactgggcaacgatccgcgtctggccgcgatgctggtggccgcgcagggggaggatgagattgccacggcggccaaactggcggctatccttgaggagccgccgcgcggaggcagcagcgatctggggcaggcgttttcgcgcaatcaggggaactggcagcagcgggcgcagcagctctgtaagcggcttaacagccgcggcggcgtgccagacagtgagagcatctcccggctgttagcgcaggcgtttccggaccggattgcgcgtcggcgcgggctggacggtcgctaccagctggcaaacggtatgggggcgatgctggacagcgatgatgccctgacgcgtcatgagtggctgattgcgccgctcctgctgcaggggagcaactcaccggatgcgcgtatcctgcaggcgattgccgtcgatattgacgccctgacccgtacctgtccgcatctgctccagcaatcggacatcgtcgagtgggatgacgcccagggcacgctgaaggcgtttcgtcgcagccagattggcaaactgacactcggaacgaagccgctggcgaagccgtcggaagacgagctccatcaggctatgctgaacggcattcgggaaaaagggctgagcgtgctgaactggacgccggaggctgaacagtaccgcattcgcctgcactgcgccgctcgctggttgccggagtacgcctggccagcggtggatgacgaaacgttactcgcgtcgctggaggcctggctactgccgcagatgagcggcgtacactccctgcgggcgctgaaagcgcttgatgttaaggtcgcgttacagaatttactggactggtcattgcgtcaacgtctggatagtgaactgccagggcattacactgtgccgaccggaagccggattgccatccgttatcatgaggataatccgccggcgctggcggttcgaatgcaggagatgtttggtgaggcaaccacgccgtctatcgctgaagggcgcgtgccgttggtgcttgaactgctgtcgcctgcgcatcgacccttgcagatcactcgcgatctgggggcgttttgggcggggagctaccgtgatgtgcagaaagagatgaaagggcggtaccccaaacacgtctggcctgacgatccggcgaatacggcgccgacgaagcggacgaagaagtattcctgatagggatgtgcggcctgatgccctcaccccggccctctcccacagggagagggagaactaattttgagagatttcttctttcacagaccggtggaagaaaagagaatcgggcctttgcgcctgaaagttgcggagaaaaagcatggcggggaatgaccgcgagccaataggacgtaagggaagaccaacgcgtccggcgaaagaaaaggtaagccgtcgtcgcctcagagatgaggactatgacgatgactatgaagacgatgatgaggatgaagaaccgatgccgcgtaaagggaaaggcaaagggcgcaagcctcggggcaaacgcggctggttctggctgctgctgaagctctttattgtttttgttgtgctgatggcaatttacggcgtctatctggatcagaagatccgcagccgtatcgacggtaaagtctggcagttacctgcggcagtgtatggccgcatggtgaaccttgagccagatatgtccatcacgaaaaacgaaatggtaaaactgctggaagccacccagtatcgtcaggtgtcaaaaatgacgcgccctggcgaattcaccgtgcaggccaacagcattgagatgatccgccgtccgtttgatttcccggacagcaaagagggtcaggtgcgcgcgcgtctgacctttgacggcgatcgtctggataccatcgagaacatggataacaaccgtcagttcggtttcttccgtctcgatccccgtctgatcaccatgctctcgtcggcgaacggcgaacagcgtctgttcgtggcgcgtaacggcttcccggatctgctggttgataccctgctggcaaccgaagaccgccacttctacgagcatgacggcatcagcctctactcgattggccgtgcggtcctggcgaacctgaccgcgggccgtaccgtgcagggggcaagtacgctgacccagcagctggtgaagaacctgttcctctccagcgagcgctcttactggcgtaaagcgaacgaagcgtatatggccgtgctgatggatgcacgctacagcaaggatcgtatccttgagctgtatatgaacgaggtgtacctcggtcagagcggcgacaacgaaatccgcggcttcccgctggcgagcctgtactactttggtcgtccggtcgaagagctgagtctggaccagcaggcgctgctggtgggcatggtgaaaggggcatccatttataacccgtggcgtaacccgaaactggcgctggagcgtcgtaacctcgttctgcgtctgctgcaacagcagcaggtgattgaccaggagctgtacgacatgctgagcgcacgtccgctcggcgtgcagccgcgcggtggggtgatctcgcctcagcctgcgtttatgcagctggtgcgtcaggagctgcagagcaagcttggcgataaggtgaaagatctctccggcgtgaagatctttacgacctttgactccgtggcgcaggatgcggcagaaaaagcggcggtggaaggcattccggcgctgaagaaacagcgtaagctctccgatcttgaaaccgcgatggtggtggttgaccgtaactccggcgaagttcgtgcgatggtgggcggtgccgagccgcagtttgctggctataaccgtgccatgcaggcgcgtcgctcgatcggctctctggcaaaaccggcgacctatctcactgccttgagtcagccaaaccagtatcgtctgaatacctggattgcggatgcgccgatctccctgcgccagcctaacggccaggtgtggtcaccgcagaacgacgacaagcagtttagcggtcaggtgatgctggtggatgcgttgacgcgctccatgaacgtgccgacggtgaacctgggcatgtcgctgggtctgccagcgattgtcgatacctggcagaagctgggcgtggcgaaagatcagctgcacccggtaccggcgatgatcctgggtgcgctcaacctgacgccgatcgaagtggcgcaggcgttccagacgatcgccagcggcggtaaccgcgcgccgctctccgccctgcgttcggtgattgccgaagatggctccgtgctgtatcagagcttcccgcaggcggaacgtgccgttcctgcgcaggcagcctatatgacgctgtggacgatgcagcaggtggtgcagcgcggtaccggccgtcagctgggagcgaagtatccgggcctgcatctggcgggtaaaaccgggaccaccaacaacaacgttgacacctggtttgccggtattgatggtcgtgaagtggtgatcacctgggtaggccgcgacaacaaccagccgacgaaactgtacggcgctagcggggcgatgtcgatttaccagcgttatctggcgaatcagtccccggtgccgctgaacctggttgcgccggaagatatcgtcgatatgggcgtggacagttccggtaacttcgtctgcggcggcggaatgcgtactctgccggtctggacaaccaacccggattccctgtgccagcaaagccagccagaacagccaacgggtaacccgtttgagcagtcttctcagccacagcagccgcagcagcaacagccgcagcagcagaacgagaagaaagacagcgatggcgtcgcaggctggattaaagatatgttcggcggtaactaaccgcgtgaggtccccccgcaaggggggatttttttacccattcccccctttttttaaccctctttttaatattgattaacccttcgttctctcctggttatttcttaaacccttaattctcgtagggccgcttactgcttgctatgcagtcagcgtttcgcctattatgctgcggtcataataataattctcgtttacgttatcattcacttttccatcagagatacaccatggcgctttccaatactgctcagccaatcaatacgtcgctgcgtaaaatcgcggtcgtcgtcgccacagcggttgccggcatgtcggcttatgcacatgctgccgaaaccccgaaaaaagaagaaaccattacggtaaccgcagcacctgcggcacaggaaagtgcctggggaccggcacccacgattgcggctaaacgcaccgccaccgcgaccaagaccgataccccgattgagaaaaccccgcagtctatttctgtcgtcacccgtgaagagatggacatgaagcagccggggacggttaaacaggcgctggcctatacgccgagcgtgttcgcaacacgcggggcgtctacaacgtatgacgttgtttctattcgtgggttcaccacctccagcaccgtgaatactaaccagtatctggacgggatgaagctgcagggagataactattctgaagcgtctatggatccgtatttccttgagcgcgtcgagctgctgcgtggcccaacgtccgttctgtacggtaaaagccacccgggcggcgtggtcagcatggtcagcaagcgcccaaccaccgagccactgaaagaaattcagttcaaaatgggtaccgataacctgtggcagaccgggtttgatttcagcgatgcgattgatgatgacggcgtgtggtcataccgtctgaccggactggggcgcagcgaaaatgcgcagcaggagatggtgaaatcttcccgctacgccattgcacctgctttcagctggcgtcctgacgataaaaccgattttactttcctgagcaacttccagagcgatccggatgcaggctattacggctggctgccgcgggaaggtaccgttgtgccttactacgatgccaacggcaaagcacacaagctgccgaccgatttcaacgaaggtgaagaagataacaagatctcccgtcgtcagaaaatggtgggttacagcttctcgcatcagtttgatgacacctttaccgtgcgtcaaaacctgcgctacaccaaaatcaatacgctttaccgttccgtctacggtaacggctatattgcaccggctcagatcagccgcgcgtatgtgcgctccgatgaggacctcaactcgtttaccgttgatactcagcttcagtccaaattcgcgacgggtgcagtggatcataccctgttgacgggcgttgattacctccgcatgcgtaatgatattgatgctgactacggcacggccgatcccatcagtatgacgaagcctgcgtacggcaatccaaatgtcgacgtttactacctttacaaagtgctcaaccgtcaggaacaaaccggcctttatgcgcaggatcaggctgaatgggataagtgggtactcacaatgggtggccgctatgactttgcgaaaacctcagcactgacgcgtacaaccggtactaccgcggaaatcaacgatcaggcattcacgtggcgcggcgggattaactacctgttcgacaacggcatcacgccttatttcagctatagcgaatcgttcgaaccgatttcgggtaccactcagggcggcaaaccgttcgatcctgcacgcggcaagcagtatgaagcgggcgtgaagtacgtaccgaaagatctgcctgttgtggtcacggctgctgtttatcagttaaccaaaaacaacaacctgacggccgatccggcgaacccaaccagcggctttagcgtgcagggcggtgaaattcgctctcgcggtttcgaactggaagcgaaagctgccgtctctgccaacgtgaacgtgacggcttcctatagctttactgatgcgaaatacacacacgatacctggtatgaaggccgtcgtccggcggaagtgccgcgcaatatggcgtctctgtgggcagattataccttccacgagacggcgttgagcggtctgacggtaggggctggcacccgttacattggtaacaccgtgtcctattactctgcctcgtcgccaaaagcctaccagtcgttcaacgtcgcgggctatgccttggcggatgccaccgtgaaatacgatctggcacgctttggacttcccggctcttctgtcggcgtcaacgtgaacaacatcttcgatcgcgaatacgtctccagctgctacagcgaatatgcatgctactggggagcaggacgtcaggttgttgctaccgcgaccttccgcttctaatctctcttcgggcacggttcgccgtgccctttttatttaagttggctgatatgcaggataatcaaacgcaacccgacaccacctttacgctcaaccatctctcctttcgcgtacccgggcgcaccttgctgcatccgctctctttgacgtttcccgcaggtaaagtcactggtctgattggtcacaacggttccggtaagtccacgctgctcaagatgctgggacgacatcagccgccgtcagaaggcgacattctgctggatgaccaaccgctggagagctggagcagtaaagcctttgcccgcaaagtggcgtatctgccgcagcagctgccgcaggcggaggggatgacggtgcgagagctggtggcgattgggcgttatccgtggcatggcgcgcttggacgctttggcgtggccgacagagagaaagtggaagaggcgattgcgctggtcgggcttaagccgctggcgcaccgtctggtggatagcctgtccggcggtgaacgccagcgcgcgtggattgcaatgctggtggcccaggacagccgctgcctgctcctcgacgaacccacctccgcacttgatatcgcccatcaggtcgatgttctggcgctggtgcaccgcttaagccagcagcgcggtctgacggtgattgcagtgctgcatgatatcaacatggcggcacgctactgcgattaccttgttgcgctgcgcggcggcgaaatgattgcgcagggaacgccgtccgagctgatgcgcagcgaaacgctggaacagatttatggtattccgatgggtattctgcctcacccggccggggctgcaccggtgagcttcgtgtactgatgctggacaacatgcgcattagccgccgtcgcctgctgacggcgatggccctctcaccgctgctgttaaaaatgaatacggcgcgtgccgccgccgtcgatccgcaccgcatagtggcgctggagtggttgccggtcgagctgatgatggcgctcggcgttacgccctacggcgtcgcggacattcccaactataacctctgggtgaacgagccgaagctgccggactcggtgatcgacgtcggcctgcgtacggagccaaacctcgagctgctcacccagatgaaaccgtcgttcctcttctggtccgcgggctacggtccgtcagaagaggtgatggcgcgcattgcgcccgggcgcggattcgctttcagcgacggtaaaaaaccgctggccgtagcgaaaaattcgattggcgagatggcgcatttccttaaccgggaagcggaggccaaacggcatctcgccgaatttgatgccctcatcgactccctgaagccgcgttttgctcaccggggcgatcgtccgctgctgatggtgacgctgctggatgcccgccatatgctggtctttggtaaaaactgcctgttccaggaggtgctggacagcttcggcattcgcaacgcctgggaaggggagatgacgttctggggcagtaccgctgtgggtatcgatcgcctcgcggcgtttcgcgatgtggatgtgctgtgcttcgatcacggcaacgagcgcgacatgcaaaccctgatggcgaccccgctctggcaggcgatgccgtttgtgcgcgagcggcgcttccagcgcgctccggcggtctggttctacggcgcgacgctgtcggcgatgcattttgcccgcgtgctggataacgccctgggaggtaaagcatgagtacgcgtattgcccgtttcccggcgcttctgctgatgctgatttttcttgccgcgctggcgttaaccgggttcaacctctctgccgcgttaccgcgcgcgcaatggggagccgcgctggcctcgccggatatcgacaatattcagcagatgctgttccactacagcctgctgccgcgtctggcaatctctcttttagtcggtgccggtttaggactggtgggcgtgctgttccagcaggtgttacgtaacccgctggcggagccaaccacgctcggcgtcgcgaccggcgcacagcttgggatcactatcaccacgctgtgggcgctgccgggagcgttaacctcgcagtttgcggcactcgcgggggcgtgcgtagtgggcgcactggtctttggcgtggcctggggtaaacgcctttcccctgtgacgcttatcctggccgggctggtggtgagcctctactgtggcgccattaaccagctgctggtgcttttccaccacgatcggctgcaaagcatgttcctgtggagtaccggtacgctcacccaaaccgactggagcgttgtgctgcgcctgtggccgcagctggctggcggtgtcgtgctgacgctgctgctcctgcgtcccctgacgctgatgggactggatgatggcgtggcgcgtaacctggggctggcgctgtcgctggctcgactggcggcgctgacgctggcgattgtattgagcgccctgctggtgaacgcggtcggcatcatcgggtttatcggcctgtttgcgccgctgctggcgaaaatgctcggggcgcgtcgtttgctggcgcgtctgctgctggcctcgctgattggggcgctgatcctctggctttccgatcagcttattctctggctggcgcgggtgtggcgggaagtctctaccggctcggtcacggcgcttatcggtgcgccgctgctgctttggctgctgccgcgtctgcgcagcatgagcgcgccggcgatggatgcgggcgataaagtccatgctgaacgtcagtcggtactgtggtttagccttgccgggctggcggtgctgattattgcctcgttcgcggcgctctcattcggtcgcgatgccgcgggctggcactgggcaacgggcgatttactcaacgacctgctgcagtggcgctggccgcgtatctttgctgcgctgatcgcaggggtaatgctggcggtggcggggtgcattattcagcgtttgaccggcaacccgatggcgagcccggaagtgcttgggatcagctctggcgccgcctttggcgtggtgctgatgctggtctttgtgccgggcaatgcgtttggctggctgatgcctgccggcagtctcggggcggcggttacgctgctgattatcctgattgccgctggtcgaggcgggttttcaccgcaccgcatgctgctggcggggatggcgctcagcaccgcgttcaccatgctgctgatgatgctgcaggcaagcggcgacccgcgtatggcgaagatcttgacctggatatccggctcaacgtacggcgcgaccggcagccaggcgatcgggtccgggatcgtgatgatcgtactgctggcgatggtgccgctgtgccgacgctggctgactattctgccgctcggcggtgaaaccgcacgtgcggtgggcatggcgctgacgccagcacgtgtagcgctgctgctgctcgccgcgtgcctgacggcgacggccaccatgacgattggcccgctgagttttgtggggttaatggcgccgcatatcgccagaatgatggggttccgccggacgatgccgcatatcgtcatgtcggccctcacgggcggggtgatgctggtgtttgcagactggtgcggaagaatggtgctgttcccgtatcagatcccggcggggctgctgtcgacctttattggtgcgccgtattttatttatctgttgagaaagcagagtcggtaatcaggtgcggccttatgccctctcccacggggagagggagaacaccttaggccgggtaagcgttagcgccacccggcaatgcccttacagtttcgcaaacaccttacgcgccgcgtcgatggtgttgttgatatcttcttcgctgtgcgccacggacataaagcccgcctcgaatgcggacggtgccaggtacacgccttcttccagcatcaggtggaagaagcgcttgaagcgttcaacgtcgcacttcaccacgtcctgatagcgggtcacggttttcgcctcggtgaagaaaatcccgaacatcccgcctacgtggttaaccaccagcggaataccggcctcttctgccgcttccagcaggccgtttgccagctgcgtggtccggtcggtcagggtttcgtgaatacctggctgcgccacttcggtcaggcaggcaaagcccgccgccatggcgatagggttgccggagagcgtgcccgcctggtaaaccgggccggttggtgccagcgcttccatgacgtccttacgaccaccgaacgcgccgaccggcatgccgccgccgatgattttacccaggcaggtgaggtccggctccacgccgtaataagactgggcgcccgccagcgccacgcggaagccggtcatcacttcgtcgatgatcagcagcgcgccgaactcatcgcacagggcgcgcaggcccggcaggaagtcaggctgcggtgggatacagttcatgttgcccgcaaccggctcaacgatgatgcaggcgatctcctgcggatactgctcgaacgccgcgcgaacggtgttcagatcgttgtaggtgcaggtcagggtatgcttcgcgaaatccgcaggtacgccaggcgagtttggctggccgagcgtcagcgcgccggaacccgctttcaccagcaggcagtccgcgtggccgtggtagcagccttcgaacttgatgattttatcgcggccggtaaaaccgcgcgccaggcggatggcgctcatggtggcttcggtaccggagttcaccatgcgcaccatgtccatggtcgggaccagctcggtgaccagttccgccatcttcacttccatttcggtaggcgcaccgaagctcaggccgcgctgggcggcttcaatcacggcgttacgaatggccgggtggttgtgccccagcaccatcgggccccaggagccgacataatcgatataggctttgccatcgacatcatacagatacgcgccgtcagcacgttcgataaacagcggcgtgccgcccacgccggtaaaggcgcgcacaggtgagttcacgccacccggaataagctcgcgggctgcactgtagaggttttcagacttgctcatggcgtcgttcctggttcgtataaaatgattaagcccactattctaagtgattcggggaaggttatgaaatttttagcctggtaatgctttaagatttgttaagtaattttcaggagacggtggggcagtctctggtaaaatccacgcggcttttgtatgacgaataagtacaggacatgaaatcagattctccgtcttttgaagaacaacagtttacgcgcgcccagcatcgaatcagtattcgacggctgctcaatcgcgataaaacgccgctggcgatcctgctggccgctgccgtggtgggaacactcgccggtctggtgggcgtggcgtttgaaaaagcggttaatgccgtgctcaactggcgagtgggaaccgtggccggtttcgccgacagccgatggctggtctgggttgcggcgttcgggctgtcggcgctgtttgccatggtggggtattttctggtgcgtaaatttgcgccggaggcgggcgggtccggcatcccggaaattgaaggggcgctggaggagctgcgtcctgtgcgctggtggcgagtcattccggtgaaatttatcggcggcatgggtacgctgggcgcggggatggttcttggccgggaaggacccacggttcagctgggcgggaacgtcggccgcatggtgggcgatctctttcggatgcgcagcgccgaagcgcgccatacgttgctggcaaccggtgcggcggcggggctatcggcggcctttaacgcgccgctggcgggcattttgtttatcatcgaagagatgcgcgcgcagtttcgctacaacctgatctccattaaagcggtgtttaccggcgtcattatgtcgagcatcgtgtttcgcctctttaatggcgaaggggcggtcattgaggtgggtaaactgaccaacgcgccggttaacaccctgtggctttacctgatcctcggcatgatttttggcgtggtgggaccgctgtttaacacctttatcctgcgcgctcaggatatgttccagcgtattcacggtgggaatacgactaaatgggtgctgatgggcggcctgcttggcggaatctgtggcgtgctcgggtttatcgagccaaatgccgcgggcggcggcttcgggctgatccccattgcggcggcagggaacttcagcgtgggtctgctgctgtttatgtttatctcccgcgtcatcaccacggtgctgtgcttctcctccggcgcgcccggcgggatattcgccccgatgctggcgctgggaaccttgttgggcaccgcgtttggtatggcggctgaagcgggctttcccgcctatcaccttgatgcagggacctttgcggtagccggaatgggggcgctgctggccgcctccctgcgcgcgccgttgaccggtatcgtgctggtgctggagatgacggacaattaccagctcattttgccaatgatcattacctgtctcggggcgacactattagcccagttcctgggtggaaaaccgctatactccaccatcctcgcgcgtaccctggcaaaacaagaggcggagcgggccgccgcgcagaatacttgaatgaattaccagggtattagataatgacgaaaagaattgggtgaattttacccaatagcagtattcatgggagcataagatgagtgatgacgtagctgtgccgctggaatttaccgaagcagcagccaacaaagtgaaaaccctgattgccgacgaagacaatccggatctgaaactgcgtgtctatattaccggtggcggctgcagcggcttccagtacggttttacttttgacgatcaggttaacgatggcgatatgaccattgagaaacagggcgtcgcgctggtggttgacccgatgagcctgcagtatctggtaggtggttcggtcgactacaccgaaggtctggaaggttcacgctttgtggtgaccaacccgaatgcaacaagcacctgcgggtgtgggtcttcgttcagcatttaagcctgaatgcggattgtaggcccggtaagcgaagcgccaccgggcttataaacgacgcctatcttgaagtttcatccagcgcaaacgtcggcagcttcaggtgccagcgtatcgccgctaaacgtatcgccagcgtcacgatcatccccagcatcgcggcgttttccagcggaatggcaaaggtgtaatacgcggtcgcgtggacaatgccgcccgcaatacaggccgttgcgtaaatttcagtacgcaggatcatcggcacctcacgtgccagaatgtcgcgaatgatcccgccgcccacgccggttaatacgcccatgcagatcgccaccatcggaccggtgcccgcattaaacgccttattgacgccaataccgacaaacacggccagaccgacggcatccagtaccggcaatatccattttggtaatcgacggggctggcgaaccagcacaatggttaacagacaggtgaccatcgcgaccaccaggtcggttggatctttcacccaaaacaccgggccattggccagcgccatatcgcggatagtcccgccgcccacggcggtcaccacgcccagcaccagcacgccaaacggatccatgcgtagttttccggcgagcaggacgccggagatagcaaaaacggctgtgccaagaatatccagccaataaacgagcatcgttaaatcctcgaaaagggtcttatgttagtgactctctgccagcgcggcacagagctgttttgcggcgaggataatacgcgggctggcgcgttcaaaccagtcgctgttgaggggtattaccggtatttttagctgcttttgccagaattgctcgattttgggaatttcgctcgcatttccgaccaccacgatggcctgtggctggcgcgccagaacctgctcacggcttacctgaggccacggtacccggctggctgcaaagatgttttcaccgccacagacttccagtacctgattctgaatcgaccctttaccggtggtgaacagcggctggctgccaaactgcaggaagatgcgctttttaacaggggtatcgtatcgggatttcagcgcggcatagtcgctgagcatctgtttcgctgcagcctcggcttttttgggcgtagggctatagggtgccagggcctgtagcgcctgagcgacctgctcaatgctgacggcatcaatccacatgaccttgatgccaagggaggtaagctggttaacctgccgctcggcgttgccgccgcgccaggccagcacgagatccggtttcagcgccacgatgcgctcaaggttcatcccttgccaggtcgccacctgttcaatgcccgcagcctgtgggggataatccgaaaagctgctcacgccaacgggcgtgatcccggcggcaaacgccagttcggtattggcgggagagagggtaatcacacgcggcgcggcaaaaagccacgccggtgcgagcagaagcagggcggccagcgccctgaggggatgtttagccacgtgccaggttctgcaccaggcgttccaccatcacggtggactgttttgctgcaacggtcaggaactcgtcgaagctgatgtgggactgctgatctgccacgtcagagatggcgcgaaccactacaaacggtacgttgaaattatggcaaacgtgcgcgatcgcggtcgcttccatctcaacggccaccgcctgagggaagttatgacggattttcgccagaccgacggagccgttgatgaacgcatcaccgctgacaatcagacctcgtaccgcgttgaggttgagctccgcaatgcaggtctctgccgccgcaatcagtttgtcgtccgctttaaaccctgccgggcagcccggaagctggccgtactcgtagccgaacgcggtgacgtccgcatcgtgatagcgcgcttcgtcggaaacaacgatgtcacccactttcagcgtcggcgccaggccgcccgcagagccggtattcacgatcacgtccggcttgcagcgctcaagcagcagggtggcacccagcgccgcagcgactttaccgatgcctgatttcagcagagccacgtcaacaccgtttagctgaccggtatagatctcacaacctcccagagagagggtctgacggttctcaattttgtcacgcagaagcgtaacttcttcttccattgcaccaataatgccgattttcatagatttactcgcgatgtgccttgttaagatgcatagtctatcatgcggttaaggggaaacgcattctcacgcgggggagcacatgtcaccaatcgattttcgcaccaaaattaactggcaccgacgtttccgttcgccgcagggcgacaagagcgaacatgagatcctgcgtatcttcgaaagcgatcgcgggcggatcattaactcgcccgccatccgccgtctgcagcaaaagacccaggtctttccgctggagcgtaacgccgcggtgcgcacgcgcttaacccactccatggaggtgcagcaggtcgggcgctacatcgccaaagagattttaagccgtctcaaagagcagcgcttactggaaacctatggtctggacgagctgacggggccttttgagagcatcgttgagatggcctgcctgatgcatgacatcggcaacccgcctttcggtcactttggagaggcggctatcaatgactggtttaagcaacggctttacccttcggatgcggtaagccagccgctgagcgacgaccgctgcatcgtacgcgatttacgcctgcgtgaaggtgaagaggggctgaacgatctgcgccgcaaggtgcgccaggacctctgtcactttgagggtaacgcgcaggggatccggctggtgcattccctgatgcgtatgaacctgacctgggcgcaggtcggctgcattcttaaatatacgcgccccgcgtggtggatgggggagacgcccgcgtcccacagttatttaatgaaaaaaccgggctattacctttccgaagaggcttatattgaacggttacgtaaagaactttcattgacgccaaacggccgttttccattgacctggattatggaagccgccgatgatatttcctattgcgtggccgatctggaagatgccgttgagaaaagaattttcagcgtcgaagagctttatcagcatctttatacagcctggggcacccatgaaaaaggctcgctgtttgcgcaggttgtcgaaaatgcctgggaaaaatcgcgctcaaatacattaagccgcagtacggaagaccagttctttatgtatttgcgggtcaatacattaaataagctggtgccgtacgcggcgtcacgctttattgataatttgccgctgattttcagcggggaattcaaccatgccctgctggaagatgacagcagtttcagccagctcctcgagctttataaacatgtggcgatgcggcatgtattcagccatccggatgtcgaacagttagagctgcagggatatagggtgatcagtgggttactggaaatttatgctccgctgctccagctgtcggtcgacgaattcagcgagctggtagaacacgagcgcgtgcgccgtattcccattgaatcacgactttatcaaaaactttctacccgacaccgtctggcgtatgtcgaagcgattggcaagctggatcgccagtcaccgcagtggccggtgatggaatattattaccgctgccgtcttatccaggactatatcagcggcatgacggatttgtatgcctgggatgaatatcgcaagctgatggcggtggaataacccggagttttgtaaagacggccaataaatttttaccttttccataaacttatcgccggaactaagcggtataaaacgaatctgagttacacagcaattttgcgttacctgtaaatcgagattgagaaacatgaaaaaaaccacattagcaatgagtgcactggctctgagtttaggtttagcgctgtctcctctgactgctactgcagccgagaccgcgtcgtcggcagcaaccgcgcagcagatgccaagcctggcaccgatgctcgaaaaagtgatgccatcggtggtgagtattaacgttgagggtagcacgaccgtcaatacgccgcgcatgccgcgtaacttccagcagttcttcggcgacaactcgccgttctgccaggacggttcgccattccagagctctccgttctgtcagggcggtggcgcaggggatgacagccagggcggcggccagcagcagaaattcatggcgcttggctcgggggtaatcattgatgcagcgaaaggctatgtcgtcactaacaaccacgttgttgataacgcgagcagcattaaggttcagctgagcgatggccgtaagtttgacgccaaagtggtcggcaaagacccgcgctccgacatcgcgctgatccagattcaggatccgaaaaacctgacggcgattaaaattgccgactccgacgcgctgcgcgtgggtgactataccgtggcgatcggtaacccgttcggtctgggtgaaaccgtgacctcgggtatcgtctctgcactgggccgcagcggcctcaatgccgaaaactatgaaaacttcatccagacggatgcggcgatcaaccgcggtaactccggcggcgcgctggtgaacctgaacggcgagctgatcggtatcaacaccgcgatcctggcaccggacggcggcaacatcgggatcggctttgctatcccaagtaacatggtgaaaaacctgaccgcgcagatggtgcagtatggccaggtgaaacgcggtgagctgggtatcctgggtacggaactgaactccgaactggctaaggcaatgaaagttgacgcccagcgcggggcattcgtcagccaggtgatgccgaactcctctgccgcgaaagcgggcattaaagcgggggatgtgatcacctccctgaacggtaaaccgatcagcagctttgctgccctgcgtgcggaagtcggctctatgcctatcggcagcaaagtgacccttggtctgctgcgcgacggcaaggcggttaacgtcagcctggagctgcagcagagcagccagaatcaggtggactccagcaccatcttcagcgggattgaaggtgccgagatgagcaacaaaggcgcagataaaggcgtagtggtgaataacgtgaaggcgaattcaccggcagcccgtatcggcctgaaaaaaggcgatgtgatcatgggcgctaaccagcagccggtgaaaaacatcgctgaactgcgtaagatcctcgacagcaaaccttccgtgctggcgctgaatatccagcgtggggacacctctatttaccttctgatgcagtaatcctctgaagcccctgttcgcaggggcttttctcgtttctgtgacctttcacacaagtccacacttcttcctctctctttgtgcatctgcacaatgcgggcgccgctgaacttccctatgcttgagctctgctcacgggagggttctatggctggctggcatcttgataccaaaatggcgcaggatattgtggcgcgcaccatgcgcatcattgataccaatatcaacgtaatggatgcccgcgggcgcattattggcagtggcgatcgcgagcgtattggggaattgcacgaaggcgcgctgctggtgctctcccaggggcgcgtggttgatatagacgatgcggtagcgaaacacctgcacggcgtccgtcagggcatcaatttaccgctgcgccttgaaggcgagattgtgggggtcatcggcctcaccggcgagcccgagtcattgcgaaaatacggtgagctggtctgcatgacggcggagatgatgctcgagcagtcgcggctgatgcacctgctggctcaggacagccgcctgcgcgaagagctggtgatgaaccttattcaggcagaggagcatacgcctgcgctgagcgagtgggcgcagcgtctggggatcgatctgaaccagccgcgcgtggtggcggtcattgaggtcgacagcggccagctgggcgtagacagcgcgatggccgagctgcagcagctgcaaaatgcactggcgacgccggaacgcgacaacctggtggcgatcgtctctctgacggagatggtggtgctcaaaccggcgctcaatgcgtttggccgctgggatgcggacgatcatcgccgtcgcgtggagcagttaatttcccgtatgaaagagaatggtcagctgcgttttcgcgttgcgctgggcaactactttaccggtccgggcagtatcgcccgctcctggcgaaccgcgcgcaccaccatgatggtgggtaagcagcgaatgccggaaagccgcagctatttctatcaggacctgatgctgccggtgctgctcgacagcctgcgcggtggctggcaggccaatgagctggcgcggccactggcgcgcctgaaagccatggacaataacggcctgctgcgccggacgctgcaggcgtggttccgtcataacgtgcaaccgctggcgacgtcaaaagcgctgtttattcaccgcaataccctggagtatcggttaaaccgaatttcagagctgacggggttagatctgggaaatttcgatgacaggctgctgctgtatgtggcgctgcatttggatgaacagagatgatgctgtttgccgggtggcggcttcgccttacccggcctacatgcgttcgtaggcccggtaagcgaagcgccaccgggcaataaaacggcttatttgttgcgggttaacttctcaagatccgcttcaatctcgctgatcttattggtaacaacgctttcaaggtgacgcaggtcgtcaaggatcttgcgcttgagatcgacttcggtgcggtcgcgctggcagatctgatcgagttcatcgatcacatagcgcaggttagggctgatttcctgtacttctttgtatccctgtcctacaccgtcagcaacaacggtcttacgctggcgtgggtatttaaacttcacgcttttggcgaaaaactctcctttgtccttgtgaaaatagattttcaaaatatcgttattggcttcctggcggaggctgtaacgatcaatttcatcaggattggtaatgcccagacttttcagattatcgtacatagcggtacccttgatctcaacataacctttgaataattaacgaaaaaatctattttcgccaccctcagatataaaaaaagcggggttgcccccgctttttgttatacccgattaatcgatggtgcgcagcaattcgttgatgcccactttaccgcgcgttttcgcatccactttcttcacgataaccgcacagtacaggctgtatttgccatcttttgacggcaggttgccggaaaccaccacggagcccgccggaacgcgaccgtaatgcacttcaccggtttcacggtcgtaaatacgggtgctctggccgatgtaaacgcccatggagatcacggaaccttcttccacgatcacgccttccaccacttctgaacgcgcgccgatgaagcagttatcttcgatgatggttgggttagcctgcagtggttccagaacaccgccgatgcccacgccgccggacaggtgaacgtttttcccgatctgtgcgcaggaaccaaccgttgcccacgtatccaccatggtgccttcatcaacgtaggcaccgatgttcacgtaggatggcatcagcacggtgttgcgtgcgatgaaggcaccctgacgcaccgccgcaggcggcaccacgcggaaaccttctttctggaaacgcgcttcgtcgtagtcagcgaacttcattggcactttatcgaagtagcggctttctgctccgtcgataacctggttatcgttgatgcggaaagagagcagcacggctttcttcagccattgatgagtgacccactgaccgtcgattttttctgccacgcgcagcgcgccggaatccagcagggaaatcacctggtttaccgcttcacgggtcacggtatccacatttgccggggtaatctcggcgcgacgctcaaaagcggactcaataacgttctgtaactgctgcattgtttactctttccatttcactaaaaaacatatcaccctttatcgtttggattgagggctgctgtcaaccgttgttgcacttcaagctgcaggtcattattaagggcacgccggtcggcggtggcgattataaataaatcttctactcgctcgccaatcgttgtaattcgggccccatgaagcgaaattcccagatcggcaaaaacctggccgacgcgggcgagcagccctggctggtcgagcgcgatcagctccaggaacgatttacgatcggtgtgggtcggcaggaaattgacctcggtatccacggtaaagtggcgcaattttgccggctggcgacgcggctgcgggggctgccagctgcgctgggtaatcgcctgctccagaccaaaacgtatcccttcatgcctgtccgacgacagcgggctgccgtccggctccagcacgataaaggtgtccatggccataccgtcgcgggtggtgaaaatctgcgcgtcatgcacgctcaggttacgtctgtccagctcggcgcagacggcagcaaacagataaggccggtccgggctccagatgaaaatctccgttccgccgcgcgtggcctgcgggcttagcaggatcatcggctgggacagatcgtgcttgagcagatgccgcgcgtgccaagccagctggtttgggctgtggcggacaaaatagttggcgcggcagcgggcccaaatctgatgtagcgcctcttcatcaatgttatccatccgcagcagcgccagcgcctgaagctggtggtgacgcacgcgctcgcgcatgtccggcgtgttctgcatcccgcgacgcagctgtttttcggtggcaaagtacagctcgcgcagcaggctctgcttccagctgttccacagggtttcgttggtagcgcaaatatccgccaccgtcaggcagaccagatagcgcaggcggttttccgtctgaacttcttccgcgaactgcttaatgacttccgggtcctgaatgtcccgacgctgcgcggtgaccgacatcagcaggtgatggcgcaccagccaggccaccagctgcgtttcacgtgagttgaggccgtgcagctcggcaaatttcagcacgtcctgcgcgcccagtaccgagtggtcaccgccgcggcctttggcgatgtcgtggaacagggcggcaatcaggatcagttccggatgggtcaggcgcggccacagctcgacgcacagcgggtggcgggagcgcgtctcttctttggcaaagctctccagcttgagcatcacgcggatggtgtgttcatccaccgtgtaggcgtggaacaggtcgaactgcatttggccgacaatgtgcgaccactgcggcatataggcccacagcacgctgtggcggtgcatcggcagcagcccgcggctgacggcacccggatggcggagcatgctcaggaacagcgagcgcgcttccgggatgtaacacaaaggctgcgtcagatgacggcgcgcgtggcgcagatggcgcagggtggtggagtagatcccggtgatggtgctgttgcgcaccatggtgtagaacatccgcaggatcgcttccggctcgcggataaacagcgtttcgtcgcgcagatcgataagcgtaccgcgcagctggaattcgtcatcaatcgggcgcggcttttcgtccgccgtcagggccagaatggcctcgtcgaacagctgcaacagcatctggttcagctcggtcacccggcgggtgacgcggaagaaatccttcatcatctgctcaaccggctcgttaccttcgccctggtaattcaggcgctgcgccacgctgagctggcggtcaaacagcagacggttatcgtagcgggtgacctccagatgcagggcaaagcggatgcgccacagcaggtgcagacactcgctgagctcgttacgctccgcctcggttaaaaagccgaagccaaccatctcgtccagcgaggtggcgccgaaatggcgacgggcgacccactgtaacgtgtggatgtcgcgcaggccgccggggctgcttttaatgtcaggctcaaggttatagctggtgccgtggtagcgctggtggcgctggttttgctcctcgaccttcgcggcgaagaacttttctgacggccagaagccgtcgctgaagatgtgtttttgcagctccaggaacagcgcgacgtcgccaatcagcaggcgggtttcaatcaggttggtggcaacggtcaggtccgatagcccttccagcagacactcttccagggtgcgcacgctgtggccgacttccagcttcacgtcccagagcagggtcagaagctcgccgattttttgcgcctgttcgtccggcagctttttgcggcttaggatcaggagatcgatatcggaaagcggatgcagctcaccgcggccatagcccccgacggcaaccagcgcgacgtcgctaacctgcccgaaaccgtagtcgatccacagacgctgcaggagctggtcgataaactcggtgcgcgcctcaatgagctgctcggcagatacgcctgcatcgaacgcgctacccagccagcgatggaaaacatccatatgggctttaatatgcgcgcaggtcagctcgtgcggcggccagacgcccgggttatcgggctggtcggggagggtgggaagggatgtgttagcatactgttcgggtaaaagattactcatcgtgcgccacccataagaaaaagctatcgccattaaaaaagccggcatttgccggcttcttatcactcaatgttcgtcagtatcgccgggatggtgtcatccttgcgcaacgtcataatttcgcagccgttgtctgttaccacaatagtatgctcgtactgggcagacaagcttctgtctttggttttcaccgtccagccgtctttcatggtgcggatgcggaagtcaccggcgttgaccattggctcgatggtgaaggtcatgcccttttgcagcacaacgccgccgtcgtctgcatcgtagtgcagaacctgcggctcttcatggaagacgcggccaataccgtgaccgcagtattcgcgcaccacggagaacccttccgcttccacaaatttctgaattgcggcgccgatagtacgcaggcgaatacccggcttcaccattttcagcgccaggtagaggctgtcctgggtgactttgcacaggcgctcgcccaggatggtcggcttgccaacgatgaacatttttgaggtgtcaccgtggtactcgtctttaatgacggtcacgtcgatgttgacgatatcgccgtctttcagcagtttttcatcgtcaggaatgccgtggcacaccacttcattaatagagatgcagacggattttgggaaaccgtggtagcctaggcaggcggaaaccgcgtgctgctcgttcacgatatagtcgttacagatgcggtccagttcacccgtactgacgcccggcttcacgaacggctcgatcatttccagcacttccgcggccagacgaccggcgacgcgcatcttttcaatttcttcaggtgtcttaatagagatagccatgtaatctgtccatcggtgtcgattttttcgacaatactagtctaagtgtcgtcaatggtatcagtcaggcacgctccgtgccaaattgagaatcattaacagcacactccgccaacaactgttggtttctggtcgtgttttgtggtataaagcgcgccggacttccgatccatctcagatacacaggctggacggaagcgacaaatctcactttgtgtaacaacacacacgtatcggcacatattccggggtgcccttcggggtcggtaatatgggatacgtggaggcataaccccaactttcaatatagaggttttaaacatggcaactgtttccatgcgcgacatgctcaaggctggtgttcactttggtcaccagacccgttactggaacccgaaaatgaagcctttcatcttcggcgcacgtaacaaagttcacatcatcaaccttgagaaaactgtaccaatgttcaacgaagccctggctgagctgaacaagatctcttcccgtaaaggtaagattctgttcgttggtactaagcgcgctgcaagcgaagctgtgaaagatgctgctaacagctgcgaccagttcttcgtgaaccatcgctggttgggcggcatgctgaccaactggaaaactgttcgtcagtccatcaagcgcctgaaagatctggaaacccagtctcaggacggtactttcgacaagctgactaagaaagaagcgctgatgcgcactcgtgaactggacaagctggaaaacagcctgggcggtatcaaagatatgggcggcctgccagacgcgctgttcgtaatcgatgcagaccacgagcacatcgctatcaaagaagctaacaacctgggtatcccggtattcgctatcgttgataccaactccgatccggacggtgttgacttcgttatcccgggtaacgacgacgcaatccgtgctgttagcctgtacctgagcgctgtagctgctaccgttcgtgaaggccgttcccaggatctggcttctcaggcggaagaaagcttcgtagaagctgaataataaggttttaccccttattagtaccgtgtatgaataggggcccattaccggccccttttttcaatttacactgtttggcccccggccgggcagttcacatctcccgaggatttaagaatggctgaaattaccgcatccctggtaaaagagctgcgcgagcgtactggcgcaggcatgatggattgcaaaaaagcgctgactgaagcgaacggcgacatcgagctggcaatcgaaaacatgcgtaaatccggtgcgatcaaagcagctaaaaaagcaggcaacgttgctgctgacggcgtgatcatcactaagatcgacggcacctacggcatcattctggaagttaactgccagactgacttcgttgctaaagatggtggtttccaggcatttgctaacaaagttctggacgcagcggttgctggcaaaatcactgacgttgaagttctgaaagcacagttcgaagaagagcgtgttgcgctggttgctaaaatcggcgagaacatcaacatccgtcgcgttgcttctctggaaggcgacgttctgggttcataccagcacggtgctcgtatcggtgttctggttgcggctaaaggcgctgacgaagagctggttaaacagctggcaatgcacatcgctgcaagcaagccagaattcgttaagccagaagacgtgtctgctgaagtggtagagaaagagtaccaggttcagctggacatcgcgatgcagtctggtaaaccaaaagaaatcgcagagaaaatggttgaaggccgcatgaagaaattcaccggcgaagtttctctgactggccagccattcgtaatggacccaagcaaatctgttgctcagctgctgaaagagcacaacgctgacgtaactggcttcatccgcttcgaagtgggcgaaggcatcgagaaagttgagactgacttcgcagcagaagttgctgcaatgtccaagcagtcttaatgattgaaaaggagccgcctgagggcggcttctttttgtcacccgtcacaggaaatcagacaggctccagtatcgctgtactgatttgcggcatatcatgtcgccagaattaacccccatcttaatcgttgacagtctcaggaaagaaacatggctaccaatgcaaaacccgtgtacaaacgcattctgcttaagctgagtggcgaagcgctgcagggatcggaaggcttcggtattgacgcaagcatccttgatcgcatggcacaggaaatcaaagaactggtcgaactgggcatccaggttggcgtggtcattggcggtggcaaccttttccgtggtgctggtctggcgaaagcggggatgaaccgcgttgtgggcgaccacatgggtatgctggcaaccgtgatgaatggcctggcgatgcgtgatgcgctccatcgcgcctatgtgaacgcccgcctgatgtccgcgatccccctgaatggcgtatgcgataattacagctgggcagaagccatcagcctgctgcgcaacaaccgcgtggtgatcctctctgccggtacgggtaacccgttctttacgaccgattccgctgcctgcctgcgcggtatcgagatcgaagctgatgtggtactgaaagcgaccaaagtcgatggcgtgtttactgccgacccggcaaaagatccttctgccaccatgtacgatcagctgagctacagcgaagtgctggataaagagcttaaagtgatggatcttgccgccttcacgctggctcgcgaccacaaattgccaattcgtgtcttcaacatgaacaaacctggcgcactgcgtcgcgtggtcatgggcgaaaaagaaggcactttgatcacggaataatttccgttgacgataaatacaggtaagattccgctttattttgtagtggtatcttacccgggcgcgcctttggcgttgtcatgaattaaacgcgactatacttagcacacctgtagcgctgtgctggcggatagtctgcctgagacaagttttcaaggattcgtaacgtgattaacgacatcagaaaagatgctgaagtacgcatggaaaaatgcgtagaagcgttcaaaacccaaatcagcaaaatccgtactggccgtgcttccccaagcctgctggatggcatcatcgtagagtactacggtacgccaacccctctgcgtcagctggcgagcgtgacggtagaagatacccgtacgctgaaaatcaacgtattcgatcgttctatgggcccggcggttgagaaagcgatcatggcgtctgacctcggtttgaacccaagctctgcgggggctgacatccgcgttccactgccaccgctgaccgaagagcgtcgtaaagacctgatcaaagtggtacgtggcgaagctgagcagggtcgtgtatccgtgcgtaacgtccgtcgcgacgcgaatgataaagtaaaagcgctgctgaaagaaaaagagatcagtgaagatgacgatcgtcgttctcaggacgacattcagaaaatgactgacgctgccatcaagaaaattgatgcggcgctggcagataaagaagcggaactgatgcagttctgatttctgtcgtacactgataaacgccgttcagagggactttgggtcttgctggcggcgttttgcttttatctggtctaacttttcgggcatctcatgaagcatttaacactccttggctcaaccggctctatcggttgcagcactctcgacgttgttcgccataatcctgaactttacaccgtgacagcgctggtggccggtaagaatgtacagcgaatggttgagcagtgcctggagtttacgccccgctatgcggtgatggatgacgaagagagcgcgcgcctgctgaaagcacagctgcttgagaagggcagtcgaaccgaggtgctgagtggccaacaggcggcctgcgagatggcggcgctggatgaggtggatcaggtgatggcggccattgtcggggcggcaggattattgccgacgcttgccgcgattgatgccggtaaggacgttctgctggccaataaagagtcgctggtcacctgcggacgcctgttcatggaggcggtgaagcagcgcggcgcacgtcttttgcccgtcgacagcgagcacaacgcgatttttcagagtttaccgcaaccttttcaacagaacctggggtacgctgacctggagcagaatggcgtcgtgtcgattctgcttaccgggtcaggtggcccgttccgtgaaacgccactgtctgaactgcgtgcgatgacgccggatcaggcgtgccgtcatccgaactggtcgatggggcgtaaaatctccgttgactctgccaccatgatgaataaaggtctggaatacattgaagcgcgctggctgtttaatgcgtcagcgaaacagatggaagtactgattcacccgcaatcggtgattcattcgatggtgcgttatcaggatggcagcgtgctggcgcagctgggcgaaccggatatgcgtacgccgattgcccattccatggcgtggccgaatcgagtgaagtccggcgtgaagccgcttgatttctgcaagctaagttccctgacgttcagtgagccagactacgaccgctacccttgtctgaagcttgcgatgacggcctttgaccaggggcaggcggcgacaacggcactgaatgcagccaatgaaattaccgttgaagcatttctgaatcagcaaattcgttttaccgatattgcggcgttaaatttatcggtactggagatgatggatttgcgcgaaccacagagcgtggaagaggtgctgacggtggatgcagctgcgcgtaatattgcgcgccaacaggtgacacgtctcgcaagctggtgataaagcaaccactagtcgtcgtgctatttgttagcgttgggcttcagtgatatagtctgcgccacctgatcgcaggtatttgactttacgtggtcaggtgagccgtggtttgacacggcttttttatgtatcggcttcagtattcctgagtaccgttaaatccttttcagggacaaaaaacgcgttatgttgtctgcgaatcaaccaataagcgaaaacttgccagctcatggctgccgtcatgtagcaatcattatggatggcaatggccgctgggcgaaaagacaagggaagatacgagcctttgggcataaagctggggcgaaatccgttcgccgcgccgtttcttttgccgccaataacggcattgatgcgttaacgctctatgcttttagcagtgaaaactggaatcgaccgctgcaggaagtgactgcgttgatggaattgtttgtgtgggcgctagacagcgaagtaaaaagcctgcaccgccacaacgtccgcctgcgtatcattggcgataccagtcgttttaactcacgtttgcaggaacggattcgtaaagcagaggcgctgactgaaaataataccggtctgacgctgaatattgcggcgaattacggcggacgctgggatattatccagggcgttcggcatctcgccgaacaggttcaggaagggctgttgagacccgaccaaattgatgaagaagcgctgagcaagcaaatctgcatgaatgaactggcacctgtggatttagtaattaggacagggggagaacatcgcataagtaactttttgatatggcaaattgcctatgccgaactttactttacagatgttctttggcccgattttgatgaacaagactttgaaggtgcgctgcatgcctttgccaatcgagagcgtcgtttcggcggcaccgagcctggtggcgacaacgcctgatgggggtagcttttgctgaagtatcgcctgatttccgcttttgtattaatacccattgtcattgcggcgctgtttttactgcccccggtgggattcgctattgttacgctggtggtgtgcatgctcgccgcgtgggaatggggacagtttagcggctttacctcgcgtacgcagcgagtatggcttgcggtactttgtggctttattctggccgtaatgctgttcacgttgcctgaatatcatcatgatattcatcagcctctggtggctggttccttgtggatatcgttggcctggtgggttgccgcgctgttgctggtgctgttttatcccggctccgcggcgttgtggcgtcattcaaaagtgctgcgactgatttttggtttgctcactattattccttttttctggggtatggttgcgctgcgcgcctggcactacgacgaaaaccactacagcggtgcgatctggctgctttatgtgatgattctcgtctggggggctgactccggggcctatatgtttggtaaactgtttggcaaacataagctggcaccgaaggtttctccgggcaaaacctggcaaggatttatcggcggtttgtttacggccgcgatcatctcctggggctacggcgtctgggcgaatcttgaagtggcaccatcaatactgctggtgtgctcgatttttgctgcgcttgcctccgtgctcggtgatttaaccgaaagtatgttcaagcgtgaagcagggattaaggacagtggacacctgattccagggcatggcggtatactggatcgcattgatagcctgacagcggctgttccagtgtttgcgtgtttgcttttactggtattcgggacgatttaacggaaggttttatgctgagcattctctggaatctggcggcgttcatagttgcactgggtgtactgattaccgtgcatgaatttggccatttctgggttgctcgccgctgtggcgtgcgcgtagagcggttttccatcggttttggtaaatcactctggacgcgcaccgaccgccacggtacgcaatttgtcatcgcccttatcccgctgggcggctacgtcaaaatgctcgacgaacgcgtcgagcctgtcgcgcctgaactgcgacacagcgcattcaacaataaaaccgttggacaacgcgccgccatcatcgctgccggaccggtagccaacttcatctttgcgattttcgcttactggctggtgtttatcatcggcgtccctggcgtgcgtccggtagtaggtgacattgcccccaactccatcgcggcgagtgcgcaaattacatccgggatggaacttaaagcgattgatggcatcgaaacccctgattgggatgccgtgcgactgcagctggttgctaaaattggcgatccgcagaccaccatcagcgtatcgccatttgggtcagacgcccgtcaggacaaagtgctcgatttacgtcaatggcgtttcgagccagacaaagaggatcccgtcgctgcgctgggcattcgtccgcgcggcgcgcagatcgagccggtattagccgaagtacaggcaaactcggcggcgagcaaagcgggtttgcaagcaggcgacaggatcgttaaagtcgatggtcaaccattaacagagtggatgacctttgttactctggtgcgcgataatccgggtacgtctctcgcgctggaagttgaaaggcagggcagtccgctttcgctgacgctgatcccggatacgaagtcggtcggcaagaaggcagaagggtttgcaggcgttgtgccaaaagtgatcccgctgccagatgagtacaagacaatacgccagtatgggccgttcagcgccatccttgaagccacggataaaacatggcaactgatgaagctgacggtcaacatgttggggaaattgataaccggtgatgtgaaactgaacaacctcagtgggccaatttcgattgcccagggggctgggatgtcagcggaattcggggtgatttactatctcatgttcctcgcgctcattagcgtgaaccttgggataatcaacctgttcccgcttcccgttttagacgggggtcatctgctgtttttagcgattgaaaagctaaaaggcgggccggtatccgagcgagttcaagactttagttatcgcattggctcgattttgctggtgctgttaatggggcttgcacttttcaatgatttctctcggttgtaagagagttagttaggaagaacgcataataacgatggcgatgaaaaagttgctcatagcgtcgctgctgtttagcagcgccaccgtatacggtgctgacgggttcgtagtgaaagacattcatttcgaaggccttcagcgtgtcgccgttggtgcggccctcctcagtatgcctgtgcgccccggcgatacggttaatgatgatgatatcagtaataccatccgtgctctgtttgccaccggcaacttcgaggatgtccgcgtcctgcgtgatggtgataccctgctggtacaggtaaaagaacgtccaacgatcgccagtatcactttctccggtaacaagtcggtgaaagatgacatgctcaagcaaaaccttgaagcatccggtgttcgtgtgggtgagtctctggaccgcacaaccctttcagacattgaaaaaggtctggaagacttctactacagcgtcggtaaatacagcgccagcgtgaaagcggttgtgactccgctgccgcgtaaccgtgttgacctgaagctggtcttccaggaaggtgtctctgcgaagatccagcagatcaacattgtgggtaaccacgcgttcagcaccgacgaactgatctccaccttccagctgcgcgatgaagtgccgtggtggaacgtggtgggcgatcgcaaataccagaaacagaaactggcgggcgaccttgaaaccctgcgcagctactatctggatcgtggttacgcgcgtttcaacatcgactcgacgcaggtgagcctgacgccggacaagaaaggcatctacattacgatcaacatcacggaaggcgatcagtacaagctttcgggtgttgaggtgagtggtaacctggcggggcattctgctgaaatcgaatcgctgaccaaaattcagccaggcgatctctatagcggatccaaagtcaccaaaatggaagacagcattaagaagctgctcggccgctatggttatgcctatccgcgcgtacagactcagccggaaatcaatgacgcggataaaaccgttaagctgcacgtgaatgttgacgcgggtaaccgtttctacgtgcgtaagatccgcttcgtcggtaacgacacctccaaagactccgttctgcgtcgcgaaatgcgtcagatggaaggcgcatggttaggtagcgatctcgttgatcagggtaaagagcgtctgaaccgtctgggctattttgaaacggttgatactgatacccagcgcgtaccgggcagcccggatcaggttgatgtcgtttataaagtgaaagagcgtaacaccggtagctttaactttggtgtgggctacggtactgaaagcggcgtcagcttccaggttggcgtgcagcaggataactggctgggtacgggttactctgtcggaattaacggtaccaaaaacgactaccagacctactctgagttctctgtaacgaacccatacttcaccgttgacggtgtgagcctgggcggtcgtatcttctataatgactttaaagccgacgatgcggatctgtcctcctacaccaacaagagttacggtgtggacggaacgcttggcttcccgattaacgaatacaacaccctgcgagcgggcttaggttacgtgcataacgacctgtccaatatgcaaccgcaggtggccatgtggcgttacctggattctattggccagtcggcgagcacgaccagcgataataacggttttgcggcggatgacttcagcttcaactacggctggacctataaccgtctcgaccgtggctacttcccaacggaaggttctcgcgtcaacctgaacggtaaagtcaccgtcccgggttccgataacgagttctataaggtgacgctggatactgcgtcctacttcccgatcgatgacgatcacaagtgggtggttctgggtcgtacccgttggggctatggtgatggtttaggcggcaaagagatgccgttctatgaaaacttctatgccggtggttccagtaccgttcgtggcttccagtccaacaacattggtccgaaagcggtttactacggcgggaacgacaaagataactgcgataagtcttcctcatcagaagtctgtagttctgatgacgcagtcggcggtaacgctatggccgtggcgagcctggagttcatcacgccaacgccgtttattagtgataaatatgcgaactccgtccgtacatccttcttctgggatgcgggtacggtgtgggataccaactgggagaacactgcccagatgcgtgcagctggcgttcctgactacagcgatccgagcaatattcgcatgtctgccggtatcgcattacaatggatgtcaccgctggggccgttggtcttctcttacgcccagccgtttaagaaatatgatggagacaaagcggagcaattccagtttaacattggtaaaacctggtaataatccgctgcaaaggaatgcgttggcagtgtagcgctgacaactggcgatcggtaaaacggtcgccttgccacgcaaagaacggtaccttctggtgccaatgggatggtaaggagttaattgtgaaaaagtggttattagctgcaggtctcggtttagcgatggcaacttctgctcaggcagcagacaaaattgcaatcgtcaacatgggtaatttgttccagcaggttgcacagaaaacaggtgtttctgcgacgctggaaaacgaattcaaaggccgtgcaagcgaactgcagggtatggaaaacgatcttcagtccaaaatgcagcgtctgcagcgtgatggttctaccatgaaggcaagcgaccgcagcaagctggaaaaagacgtaatggctcagcgccaggcgttctcccagaaagcgcaggctttcgagcaggatcgtcagcgtcgttctaacgaagaacgcggcaagctggtgactcgcattcagaccgctgttaaagcagtggctgccgatcagagcatcgatctggttgttgatgcgaacgccgtcgctttcaacagcaaagatgttaaagacatcactgctgacgttctgaaacaggttaaataagtaatgccttcaattcgactggctgatttagctcagcagttggatgcagaattacacggtgatggcgatatcgtcatcaccgctgttgcgtccatgcaatctgctaaagctggcacgattaccttcatggtaagccctaagtaccgtgagcaactggctcaatgccaggcgtcagctgttgttctgacgcaggacgatcttccatttgccactgtaagcgcgctggtagtgaaaaacccctacctgacgtatgcccgcatggctcaaattcttgataccacgccgcaaccggcccagaacattgctgccagcgcagcgattgatgagacggccaggctgggtaacaacgtcgccgttggtgcgaatgcggttatcgaatctggcgttgtgctgggcgataacgtcatcattggcccgggctgcttcgttgggaaaaatacgaaaatcggcgccgggacccgtttatgggcgaatgtgtccgtataccatgacgttgaaattggcgaaaactgcctcgtccagtccagcaccgtgattggttctgatggctttggttacgctaacgatcgcggtaactgggttaagatcccgcagcttggtcgcgttattattggcgatcgcgtggagatcggcgcctgtaccaccattgaccgtggcgcgcttgacgacacgatcattggcaatggtgttatcatcgataaccagtgccagattgcgcataacgttgtgattggcgacaataccgcggttgcgggtggcgtcatcatggcgggcagcctgaaaattggccgttattgcatgattggcggtgcgagcgtgattaatggccatatggaaatctgcgacaaggtgaccgtgacgggaatgggcatggtaatgcgtcctatcactgaacctggcgtctattcctccggcattccgctccagcccaacaaggtatggcgtaaaacagcagctctggtgatgaacattgatgatatgagcaagcgcctcaagtcccttgagcgcaagatcgatcaacaagactaagcgtcatccgtttaacgctatttttcccggcctgtcggctttctaataaaccggcaggccgtgttattattgttatcagtacattttgacaggaagagtattttgactactgacactcatactctgcatattgaagagattttagaacttctgccgcaccgctacccgtttctgctggtagaccgtgtgctggattttgaagaaggtcgttttctgcgcgcagtgaaaaatgtttccgtgaatgagccgttcttccaggggcacttccctggtaaacctatcttcccgggtgtgttgattctggaagcgatggctcaggctaccggtattctggcgtttaaaagcgtcggtaaactggaacccggtgagctgtattacttcgcgggtattgacgaagcgcgctttaagcgccctgtcgtacctggtgatcagatgatcatggaagtcacttttgaaaaaacgcgtcgtggcctgactcgcttcaaaggcgtagcgctggttgacggtaaagttgtttgcgaagcgacgatgatgtgtgctcgtagccgggagtcctgatacgtgattgataaatccgcctttattcatcctaccgccattgtggaaacgggtgccatcgttggtgctaacgcccacattggcccgttttgtattgttggaccccatgtcgaaattggtgagggtacagtactgaaatctcacgttgtggtgaatggtcacacgaccattggctgcaataacgagatctatcagttcgcctccatcggcgaagttaaccaggatctgaaatatgctggtgagtcgacccgtgtggaaatcggcgatcgtaaccgtattcgcgaaagcgtcaccattcatcgtggaacagtacagggtggtgggttgacgaaggtgggcagcgataacctgtttatggtgaatgcgcatatcgcgcacgactgtaccgtgggtgaccgctgtatccttgccaacaatgccacgctggcaggacacgtatcagttgatgacttcgcaattattggcggcatgaccgcagtccatcagttctgcatcattggtgcgcacgtgatggtcggcggatgctccggtgtggcgcaggacgtcccaccgtatgtgattgcgcagggcaaccatgccacgccgtttggcgtgaacatcgaaggcctcaagcgtcgtggttttagtcgcgaagcgattactgccatccgcaacgcgtacaaactgctgtaccgtagcggtaaaacgctggaagaggcgaagccggaaattgccgaactggcgaaaaagcacccggaagtggacgcgttcatggagttctttgaccgttcaacaaggggtctgattcgttaatggtcgacagtcgtccgcttacgatagccctggtcgccggagaaacctccggcgatattcttggtgccggtctcatccgtgcgcttaaggcacgcgtacccaatgctcgctttgtcggtgttgctggcccgctgatgcaggccgaaggctgtgaggcctggtatgaaatggaagagttggccgtgatggggatcgttgaggtgctgggacggttacgccgtttgctgcacatccgtgccgatctcacccgccgctttaccgaactcaaacccgatgtgtttgtcggtatcgatgcacctgatttcaacattaccctcgaagggaatctgaaaaagcagggcattaagacgattcactacgtcagtccgtccgtctgggcgtggcgacagaaacgcgttttcaaaatcggacggtccacccacctggtgctggctttcctgcctttcgaaaaagcgttttacgacagatttaatgttccgtgccgttttatcggtcataccatggcggatgcgatgccactggatccggataaaaacgcggcgcgcgacgcgctgggcatcccgcatgatgtgcactgtctggccttactgccaggcagccgtggcgcagaagttgagatgctgagcgccgattttcttaagacagcgcaacttcttcgccagacctatcccgatcttgaagtggtcgtgccgctggtgaatgccaaacgccgcgagcagtttgagcgcatcaaagctgacgtcgccccggatcttcacgtccgtcttctggacgggcaggggcgggaagcgatgtatgcgagcgatgccgcactgctggcctccggcacggcggcgctggagtgtatgctggcgaaatgcccgatggtagtcggttatcgcatgaagccgtttacattctggctggcaaaacgtctggtgaaaacagattacgtctcgctgccaaacctgcttgcgggtcgcgagctggtgaaagagctcttgcaggatgaatgccagccgcaggcgctggcggaggccctgctgccgctgctcgccaacggtaaaaccagccaccagatgcacgataccttccgcgaactgcatcaactgatccgctgtaatgctgatgagcaagcggccgatgcggtgctggagttagcaaaatgatggaatttgtttatcctcacacccaccttgtggcgggggtggacgaagtgggtcgtggtccgttagtgggagccgtggtgaccgctgcggtgatcctcgatccggctcggccgatcgtcgggctgaacgactcaaaaaaattgtctgaaaagcgccggctggcgctgtttagtgagattcaggagaaagcgctggcctggagcctcgggcgtgctgaaccgcatgagatagacgagctgaatattttgcatgccacgatgctggcgatgcagcgtgcggtggcggggctgaaaatttcccctgaatatgtcctgattgacggcaaccgctgtccggcattgcccatgccttcaatggcagtggtcaaaggcgatagccgggtcgcagaaattagcgcagcttctattattgccaaagtgacacgcgacgccgaaatggccgcgctggacctcacttaccctcagtatggtttcgcccagcataagggatatcccacacctttccacctggagaggctggctgaacatggcgcaaccgaacaccatcggcgcagttttggcccggtaaaacgcgccctgggacgggtgtcctgaatcattacgcaagcaattaagtaacgcggaatctgaagatggctgaaccacgtttcgtacacctgcgggtgcatagcgactactccatgatcgatgggctggcgaagaccgggccgctggtaaaaaaggcggcctcgcttggcatgcctgcgctggcgatcaccgattttaccaacctgtgtggcctggtgaagttctacggaacggcgcacggcgcggggatgaagcctattgtcggggcagattttcatgtgcagagcgatctcatcggcgatgaactgacgcaaatctccgtgctggcgatgaacaacacgggttaccaaaacctcacgctgctgatctccaaagcttatcagcgcggttacggtgcgctgggaccgtggatcgaccgcgactggctggctgaactgaacgaagggctgctcctgatctcaggcggccggatgggggacgtcggcaaatccctgctgcgcggtaacagcgcgctggtggatcaatgcgtctcgttctatgaagaatatttcccgaatcgttattacctggagttgatccgtaccggccgtcaggatgaagagagctatcttcatgccgcggtggcgctcgcagaagagcgcgggttgcccgtagtggccaccaacgacgtgcggttccttgaggcgggcgattttgacgctcacgaaattcgcgtggcgatccacgatggctttaccctcgacgatccgaagcggccgcgtaattactccgcacaacagtacatgcgcagcgaggaggagatgtgtgagctcttctccgatatccccgaagcgctggaaaacagcgtagagattgccaagcgctgcaacgtcaccgtccgccttggcgaatacttcctgccgcagttcccgacgggtgacatgaccacggaagatttcctggtcatgaaatcgaaagaaggtctggaagagcgtctggaattcctgttcccggatgaagaagagcgtaaaaagcgtcgtccggagtatgacgaacgcctggacattgaactccaggtgatcaaccagatgggcttcccgggctacttcctgatcgttatggagttcatccagtggtcgaaggataacggcgtgccggttggaccgggccgtggttccggtgccggctcgctggtggcgtacgcgctgaaaattaccgacctcgatccgctggagttcgacctgctgttcgaacgtttcctcaacccggaacgtgtctcgatgcccgacttcgacgtcgacttctgcatggagaaacgtgaccaggtgatcgagcacgtggccgacatgtacggtcgtgatgcggtatcgcagatcattaccttcggtacgatggcggcgaaagcggttatccgcgacgtgggccgcgtgctgggccacccgtacgggtttgtcgatcgcatctctaaactggtgccgcccgatccgggcatgacgctggcaaaagcctttgaggctgaaccgcagctgccggaaatctatgaagcggacgaagaggtcaaagcgctgatcgacatggcgcgcaagctggaaggcgtcacgcgtaacgccggtaagcatgcggggggcgtggttatcgccccgaccaaaatcaccgacttcgcgccgctgtattgcgatgaagcgggccagcatccggtcacccagttcgacaagaacgacgtagaatacgccgggctggtgaagttcgacttccttggcctgcgtacgctgaccatcatcaactgggcgctggagatgatcaacgcccgccgcgagaagaacggcgagccgccgctggatatcgcggccatcccgctggacgacaagaaaagtttcgacatgctgcagcgctcggagaccaccgccgtcttccagcttgaatcccgcggcatgaaagatctgattaagcgcctgcagcccgactgcttcgaagatatgatcgcactggtggccctgttccgtccgggccctttgcagtcagggatggtagataactttatcgaccgtaagcacgggagagaagagatttcctacccggacgttcagtggcagcacgaaagcctgaagccggtactggagccaacctatggcatcatcctgtatcaggaacaggtgatgcagatcgcccaggtgctttccggctatacgctcggcggcgcggacatgctgcgtcgtgcgatgggtaagaaaaagccggaagagatggccaagcagcgttccatctttgaagacggggcgaagaaaaacggcgtcgacggcgagctggcgatgaaaatcttcgacctggtggagaaattcgccgggtacggatttaacaaatctcactcagccgcctatgctttggtgtcgtatcaaacgctgtggctgaaggcacactatcctgcggagtttatggctgcggtaatgaccgccgatatggacaacaccgagaaggtggtgggcctggtggatgagtgctggcgcatggggctgaagatcctgccgccggatattaactcaggtctctaccatttccacgtcaacgacgacggggatatcgtttacgggatcggcgcgatcaagggcgtaggtgaagggccgattgaggcgatcatcgaagcgcgcaacaacggcgggtatttccgcgagctgttcgatctttgcgcccgtaccgataccaaaaagctgaaccgccgcgtgctggaaaaactgatcatgtccggcgcgttcgacaggctggggccgcaccgcgccgcgctgatgaactcgctgggcgacgccctgaaagcggcggatcagcacgcaaaagcggaagccattggccaggcggatatgttcggggtgctggcggaagagccggagcagattgaacagtcgtattccaactgccagccgtggccagaacaggtggtgctggacggcgagcgtgaaacgttaggtttgtacctgacgggtcacccgatcaaccagtacattaaagaaattgagcgctatgtcggcggccacaggctaaaagacatgcatccgacagaacgtggtaaaatcaccacggctgcggggctcgtgattgctgcaagggttatggtcaccaagcgcggcaatcgtatcggcatctgtacattggatgaccgttccgggcgtctggaggtgatgttgttcaccgacgcgctggataaataccagcaattgctggaaaaagaccgcatacttatcgtcagcggacaggtcagctttgatgacttcagtggggggcttaaaatgaccgcccgcgaagtgatggacattgacgaagcccgggaaaaatatgctcgcgggcttgctatctcgctgacggacaggcaaattgatgaccagcttttaaaccgactccgtcagtctctggaaccccaccgctcggggacaattccagtacatctctactatcagagggcggatgcacgtgcgcggttgcgctttggtgcaacgtggcgtgtctctccgagcgatcgtttactgaacgatctccgtggcctcattggttcggagcaggtggaactggagtttgactaatacaggaatactatgagtctgaatttccttgatttcgaacagccgattgctgagctggaagcgaaaatcgattctctgacagcggtaagccgtcaggatgaaaaactggatattaacatcgacgaagaagtgcatcgtctgcgtgagaaaagcgtagaactgacgcgcaaaatctttgccgatctcggcgcatggcaggtggcccaattggctcgccatccacagcgtccgtacaccctggattatgtccgcctggcgtttgacgaatttgacgaactggcaggcgatcgcgcatacgctgacgataaagcaatcgtaggcggtatcgcgcgtctggacggacgcccggtgatgatcattggtcatcagaaaggtcgtgaaaccaaagagaaaatccgtcgtaactttggtatgccagccccagaaggctaccgtaaagccctgcgtctgatggagatggctgagcgtttcaacatgccaatcatcaccttcatcgacaccccgggtgcctacccaggcgtgggcgcggaagagcgcggtcagtctgaagccatcgcacgcaacctgcgcgagatgtctcgtctgaaggtgccggtcatctgtaccgttatcggtgagggtggttccggtggcgcgctggcgattggcgtgggtgataaagtgaatatgctgcagtacagcacctattccgtaatctccccggaaggctgcgcgtctattctgtggaagagtgccgacaaagcgcctctggctgccgaagcgatgggcatcattgcgccacgcctgaaagagcttaagctgatcgattccatcatcccggaaccactgggtggggcacatcgtaagccggaagtgatggctgcttctctgaaagcacagctgctggccgatctggcagacctggacgtgctgagcaaagaagatctgctcaaccgccgttaccagcgtctgatgacctacggctacgcgtaagcctcacaattatctgaaaagccgcacaatgttgcggctttttttatacctgcggtttagccggactatgcttagctaatgttttttaaggaggaagcccatgaatatcattgccgttatggggccacacggcgtcttttataaagatgagccgattaaggagctggagcaagccctgcagtcgcgcgggtatcagctaatctggccgcacaacagcgccgatctgctgaagttcatcgagcataacccgcgtatctgcggcgtgatcttcgactgggatgaatatgacctcgaactgtgcagcgatatcaacaagctgaacgaatatctcccgttgtacgcgtttattaatacccactcaaccatggacgtcagcgccaatgatatgcgtatggcactgtggttctttgaatattccctcggcgtggcggaagacattgcgacccgcattcagcaatacacgaatgaatatctcgataacattactccgccctttacccgggcgctcttcacctacgtgaaagaggggaaatataccttctgtacgcctgggcatatggcgggaacggcctaccaaaaaagcccggtgggctgcctgttctatgatttctttggtggcaacacgctgaaagcggacgtgtccatttcagtcaccgaattaggctcgctgctggatcataccggaccgcatctggaagccgaagagtatatcgcccgcacctttggggccgagcagagctatatggtgaccaacggcacctcgacctcgaacaaaatcgtcggaatgtatgccgcgcctgcggggagcaccctgctgattgaccgtaactgccataaatcgctggcgcacctgctgatgatgagcgacgttgtaccgctctggctgtcgcccacgcgcaacgcgctcggtattctgggcggtattccgcggcgggagttcgcgcatgacgcgattgagcgcaaggtcgcggcagtgcccggcgcaggctggcctgtccatgcggtgatcaccaactcgacctatgacggtctgctgtacaacacggactggatcaaaaagactttggacgtgccgtcgatccacttcgattccgcgtgggtaccgtacaccaatttccacccgatttacgcgggtaaaagcggcatgagcggtgaacgcgtgccgggtaaagtgttcttcgaaacgcagtcaacgcacaaaatgctggccgcgttttcccaggcttcgctgattcacatcaaaggcgaatacgacgaagagacctttaacgaagcctttatgatgcatacaaccacctcaccaagctatccgctggtggcgtctatcgaaacggctgcggcgatgctgcgcggcaatcccggtaaacgtcttatcaatcgctctgtggagcgcgcactgcatttccgtaaagaggttcagcggctgaaagaggaagccgacggctggttctttgatatctggcagccggaagagattgatgaagcagaatgctggccggtttcgcccgccgaagactggcatggcttccgggatgccgatagtgaccatatgttcctcgacccggttaaggtgacgatcctgacgccgggtatggatgagcagggcaagatgagcgaggaagggatcccggctgcgctggtggcgaaattccttgatgaacgcggcgtggtggtggagaaaacaggcccctataatttgctgttcctgttcagtatcgggatcgataaaacccgggcgatggggttgctgcgcggtctgatggaatttaagcgcgcctacgatctcaacctgcgggtgaagaacatgctgccggatctctacgcggaggatcctgacttctaccgtaacatgcgtattcaggatctggcccaggggatccacaggctgatccgtcagcacgatctgccgcgtttgatgctacaggcgttcgatgtgttgccggagatgaagtttaccccgcacaaggcgtggcagcgccaggtgaggggggaggtcgaaaccgtcgagctggaaaatctggttgggcgcgtatcggcaaacatgatcctgccgtatccgccgggcgtaccgctcctcatgccgggagagatgattaccgaagagagtcgggccgtgctcgatttcctgctgatgctctgttcggtagggcgtcactatcccggttttgagacggatatccacggtgcgaagcgcgacgaaaacggcgtgtactgggtgcgagtcctaaaataagagtgaccgcttgccaggtgcgggttttcggttgtaacgttcaggcatcataaaaaggagaagctatgctgggtttaaaagctgttcatcatattgcgatcattgcgaccgattacgcgaagagtaaggccttctactgcgacattctcggctttacgctgttgagcgaggcctaccgtgaggagcgcgactcctggaagggcgacttggcgttaaacgggcagtatgtgattgaactgttctcttttccttttccgcctgcgcgtccgtcccgcccggaagcctgtggcctgcgccatcttgccttcagcgtcgatgacctggatagcgcagtaaaacatctggaagcgcacggcgtgacgtgtgaagcgatccgcgtcgatccgttcaccgacaagcgttttacctttttcaacgacccggacggcctgccgctggagctttatcagcagtaatcttcgtcctgtgtgataatgcccgttcagttcgggcattttttatgtgtaattccctatgaccttacccgctatcgcacacgccgtttcaccgtaccgccagctgctggtggggtttagcggtggcctggattccaccgttctgcttcatcgccttaagtgctggcgcgatcgggagcctgacgtccagctgcgcgcgatacatattcatcacggattaagtcctcgcgcagagatgtgggtggcgcactgcgaagctatgtgtgcggcgtgggcgatcccgcttctcgtcgagcgcgtcacgcttgcagaggaagggctgggcattgaggcgcaggcgcgtaaagctcgctatgccgcctttgccggggcattgcgtacaggagaagcgcttgtcacggcccagcacctggacgatcagtgtgaaacctttctgctggcgcttaagcggggcagcggaccggcagggctttcagcaatgcctgagcgttctgagtttgccggtacaacgttactgcgtccgctgcttggcgagacgcgcgcctcgcttgaggtctgggcgcgagaacatcagctcagctggattgaagatgagagcaaccaggatgacggctatgaccgtaactttctgcgtctgcgcgtcctcccgctattgagcgagcgctggccgcatttcgccgacgcgacggcaagaagcgctatgctgtgcgccgaacaggaatcgctgctggacgagctgttgagtgacgagctggctgaactgatttctgaagacggagcgctggcgattgcaccgctgaaagcgatgagcccggtgcgccgcgccgcgctgctacggcgctggctggcctctcatcacgccgcgatgccgtcgcgggcgatgctaaaccgtatctgggacgaggttgccctggcgcgggaggatgcttccccgtgcgtccacctgaacggttttggcgtaaggcgctacaaaggggaactctggtgggtaaaatcaacgccttcactgaccgatgtggtgctcgactggctttcacctgcgcttccgctgatattgcccagtgaggcaggacgtgtctctcttataccgtctggtcatgtgaggctgccagaggcaggtgaaccggtaacggtacgctttagggctggcggcatgctgcatattgtcggacgcaacgggggacgcaagctgaagaaaatctggcaggagtgcaacgtgccgccgtggctgcgcgacaccacgccgctgttgttctatggtgaaacattgattgctgctgcgggcattttcatcacggaagcgggatgggcggaagagggggtcaggtttgagtggcagaaagcgtaacgggcagccaggctgcccgttaatgtcatcaggattcgctcaccacgacggtgccgatttgcgggtggctgaagctggctattttatccaggcgcagctcacgcgtcacaccggcatcctccactatcaggtattccacattcttacgtgaaaccagatcgctggccttcgccttcaacacttcgccatcttttagctccagcgtcagtaataaatgatgctggcaggcgagttcgaggttgtcatagtcatcacaattgatgggttgataagtatcattcatcgacataatcgctcaccagtaaattcgccgcagcatacgctgctttttccctgaccgactctgaaaggctctcatcagaggccacttcattaagcactttcaatacacagcccaacgcgtccgggacataccccagatctccgctggcgatttccgcataccgtttgcgaattaactcacaataattattcacatcccctcccgccagcgcactgacttactgtgagatatcattaagcctacgaagataaactcggtttagcaaggtgactataccatactcatttaagcaatatcagcgccttgatagcggtgtatttatcaccctacaacagccttttgccgcggttttcgctacaatgagcgcctgattcgaatggagttctctcatggcgctgaaagcgacaatttataaagcagtggtcaatgtggccgatcttgatcgcaaccagttcctggacgcctcgctgacgctggctcgccacccctccgaaacccaggagcgcatgatgctgcgcctgctggcgtggattaagtacgctgacgagcgtctgcagtttacccgtgggttaagcgcagaagacgagccagaagcctggctgcgcaacgatcatctgggtatcgatttgtggatcgaacttggactgccggacgagcgcagaattaagaaggcctgcactcagtccgctgaagtggccttattcgcgtataatcagcgcgctgcggagatttggtggcagcaaaacaagagcaagtgcggacagtttaaaaatctcacggtctggtatctggatgatgagcagctggcgcagctgagcgactttgccagccggaccatggtgttgcaggcgacgattcaggacggtgccatctggctctctgattctcagaataatctggaaattcatttgacggcgtggcaaccggcctcatgatcgtcttgtcccgaaacgtcagcattccggacaacgagctggaaatcaccgccatccgtgctcagggtgcaggtgggcagcacgtcaacaaggcctcaacggcaatccatttgcgttttgacattcgggcctcaagcctgccagagtattataaagaaagtctgcttgctgccagccatcacctgatcaccagcgatggcgtgatggtgatcaaagcccaggaataccgcagccaggagctcaaccgggaagcggccatcgccaggctggtggcggtcatcaaagaattaacggcagtacaaaaaagccgccgggcaacgcggccaacccgcgcatcgaaagagcgtcggctggcctcgaaggcccaaaaatccacagtgaaagcactacgcggtaaagttcgtcgccccacagagtgacgaaagggaacacacttttcataaggaattcattgtgaaaaaagcattatggtcagcgctggcagtgagtacgctgtttgcgcttttcgggtgtaacaaccgctccgaaacgcaggttttacaacccacgcagacggaagaattaaaaccgatgcagcagagctggcgcggcgtattgccttgcgcggactgtgaaggcattgaaacgtccctgttcctgcaaaaagacggcacctgggtgatgaaccagcgctatcagggcgcaaaagagccttcttcttttgcaacttatggaacatgggcgcgaacggcggagaagctggttctgacggataccgctggcgagaaaacttatttccgcgccaaaggcgaggggatggagatgctggatcgtgaaggcaatccaattgaatcccagttcaactacacgctggcaccggtaaaagcggctctgcccgcgacgccgatggcgatgcgggggatgtacttctatatggcggatgcggcgatctttactgattgcgcaaccggtaagaaggtcagcgtggcaaacaatgcgcagcttgaacgtgattacgcggtggcgcgcggcaatgacagcaagccggtattgctgacggtggacggtcactttacgctggagccaaacccggatagtggagagatggtgaaaacgctggtggcagataaagacgcgaagtttgttgcgggtaaagactgtaacagtaaataagctgacgctgagccattaaaaaaccccgcctgagcggggttttttgtttagcctttgatggctttcaccaggtaatcaagaatctcgcctgtcttgatcatctgtttttcgccgctgcgacggtatttgtattcaatctcgtcgctgtcgaggttacggtcgccgatcacgacggtgtgtgggataccgatcagttccatatcggcaaacatcacgcccggacgctctttacggtcatccatcagcacttcgataccctgcgcacgcagctcggcatacagcttctcggccagctcctgcacgcggtaagacttgtgcatgttcattggcagaatcgcaacctggaacggtgcgatgttgtctggccagacgatgccgcgctcgtcatagttctgctcaatggcggcagctaccacgcgcgtcaccccgataccgtagcaacccatggtcaggatctggttacggccatcttcaccctgaacagcggcgttcagcgcgcgcgagtatttatcgcccagctggaagatgtgaccgacttcaatgccacgcttgatcatcagggtaccctgaccgtccgggcttggatcgcctgcgaccacgttacggatgtctgctacttccggcgtcgccacgtcgcgatcccagttgatgccgaagtagtgtttaccgtcgatgttagcaccggcggagaagtcgctcatcgcggctaccgtgcggtcaataacaacaggaaccggcatattcaccggaccgagagaacctgggccagcattgaccacggcgcggatttccgcttccgtggcgaacgtcagcgggctggcgacctgcggcagcttctcagctttcacttcgttcagctcgtgatcgccacgcaccagcagggcaaccagcgggtaagcgctcccttcggtggctttcaccagcagcgtcttcacggttttttcgatcggcaggttgaactgctcaaccagctcggcaatggttttcgcgtttggcgtatcaaccagcgtcatctcttgcgttgccgcagcacgtggttcttttggtgccagcgcttctgcgaattcgatgttcgccgcgtaatcggaagagtcagagaagatcacatcgtcttcaccgctctgcgccagtacctggaattcatgagatgcgctaccgccgatggagccggtatcagcctgcacagcacggaaatccagccccatgcgggagaaaattttgctgtacgccgcgtacattgcgtcgtaggtctcttgcagggattcctgagaggtatggaaagagtaggcgtctttcatcaggaattcgcgagagcgcatgacgccgaaacgcgggcgaacttcgtcacggaacttagtctggatctggaagaagttcagcggcagctgtttgtaagagctcagctcattacgaatcaggtcggtgatgacttcttcatgcgttgggccgagaacgaacggacgctcgccacgatcgacgaagcgcagcagttcaggaccatactgttcccaacgaccgctctcctgccacaggtcagcgggctgaaccacgggcatggacacctcgatagcaccggcgttgttcatctcttcacgcacgatgttttcgacttttttcaggacgcgcacgccggtcggcagccaggtgtataacccggaggccagcttgcggatcatcccggcgcgcagcatcagctgatgactgatcacttcggcgtcggcaggcgtctccttcagagtggagagcagatattggctagtacgcatgttgttacggttccatttcgacgattggaacaggctgaaacaccagcctgacacaaaaaaagtggtttagtttaccagtgtggcaaagatgccaaaagagaggagaacaaaattacctgggttcaagggcaaacacttcaaaacctgccccggtgacgcgccagcgaacgttaaaatccagcagccagacggcgtacgttttgcctgcttcctcttctttacggtaggccggacgcgggtcctgtgccagaacttcggtgatgaaatcccgcaagcgaggatagcgtttctccagttggccgaactgagcggttatctcaggcgtaaaatatacaggcatgtccgcctgtggggcgtcctgagcataacttgcacgcgcgtccggaagggcttcgacgaagggcaaatagggtttgatgtcgatcaccggcgtgccgtctaccaggtccaggctacctaactccagtatcacccgatctttctggcagcgtatgcctttcagttcaaccagcgacatgccaaccgggtttggacggaaggtcgagcgtgtcgcaaagacgcccattctcgcattgccgccaagacgaggaggacgcacggtaggacgccagccgccttccatcgtctggtgaaacacgaacaccacccacaggtggctgaacgcctcaagcccgcgtaccgcatcggcctgattgtaaggcgcaatcaggtgaagctcaccgcgtccgctggtgacaagaccgggctggcgggggacggcgaacttctctttgtaaggagagtggataacgcctatctgctcgaactgaaatgcactcatttcgccgtgatgttcagcgcagaaccgatgcacaccgcctgacggtagcagcccggcgtgccgctggtgacttcacagctgtgcagcaggaccgcgttggctttcatttttgcggcattaatctgcatgcgtttacgcgctgtcgggatattcggtggtgagtcctgattggtcgcctgacaggattcgccgctcacttcgcccagttcacggaacggtttaccgacgagttcatccgctttcgtgataatgcgaaccggcgcagggcgtgccactttcggtttcgcaggctcggtctttggcggggttgccgtgctttgaacaggttcaacgggagatctgcttagcatagaacagccgctcagcatgagtgctaaaagacagatcggtaaagcacgcataatatttcctcaatggataatcaaaacgtcagatattgaatcagttgactgcacaaatgacaagacgggcataagcccgtcctgatgatattacactgaggtgagattaccagcctttaacagcgccgccgttaaacactttgttggcttcctggtaaacttcgtcagactgataggcctgtacgaatttcttcacgttttccgcgtctttgttgtcttcgcgagtcacgatcaggtttacgtatggagagtctttatcttcaacgaagataccatctttagctggggtcaggccaatctggctggcgtacgtggtgttgataacggccagggcaatctgcgcatcgtccagagaacgtggcagctgcggtgcttccagctcaacaattttcagatttttcgggttctcggtgacatccagaacggttggcagcaggccaacaccgtctttcagtttgatcaggcccactttctgcagcagcagcagggaacgaccaaggttagttgggtcgttagggacggcaacctgagagcccggctgcagctcgtccagggatttaattttcttagagtaaccggcaattggataaacgaaggtattacccacgcccaccagtttatagccgcgatctttgatctgctggtccaggtatggtttatgctggaaggcgttcgcgtcgatatcacctttgctcagcgcttcgttcggcagaacgtaatcgttgaaggtcaccagctccacgtccaggccatatttctctttcgccactttctgagcaacttctgcaacctgctgttctgcacctacgataacgcccactttaatgtggttcggatctttttcatcctgaccgcaacccaccagtgccagagagccgatcagcgcgcctactgctgcgaaggtctttaatttaaacgccatgttttatccttaactcgtagagtttatgttgtgtgtaacgttatttgtgcgtaacagcccggacgatgcgatcgccagagaactggattaagtaaaccagaacaaccagcaataccagaacggtattcatcacggtcgcgttatatccaatatagccgtactggtaaccaatctgacctaaaccgcccgcgcctacggcaccgcccatcgcggaataaccgaccagggtgataagcgtaatggttgccgcattcaccagccctggcagtgcctcaggcagcagaaccttgcggacgatctgcatcggcgtggcgcccatcgcgcgggacgcttcgatcaaaccggttgggatctccagcagggcgttttccaccatacgggcgataaacggcgcagcgccaacggtcagcggaacgatcgccgcctgcagaccgatagacgttccgacgatcacgcgggtaaacggaatcatccacaccagtaagataatgaacgggatagaacggaagatgttcaccagcgcagagagcgtacggtacagcttcgcgttctcaatgatttgacccggacgcgtcacgtacagcaacacgccgaccggcaggccaatcacaaaaccaaagaagccagagacgaaggtcattgccagcgtttcccaaacgccgcgaaccagcagccacatcatcggctcagacataacccagtacctctacttttacgtgatgttcttgcagccaggcaatggctgcctgggtttcttcttgtgtgccgtgcatttctgtcagcatgatgccgaacttcacgccaccggcgtaatccatctgcgcgctgatgatgttgttattcacgttaaagcgacgtgcggtttcggaaagcaggggagcatcaacggactgaccggtgaactccatgcgcagcatcgggacgctgtcagctgttgcttctgttttcagacgttccagatagtcttccggaatatccagatgcagcgtggactggatgaactgctgcgccagcggggttttcggatgcgagaacacttcgcttaccgtgtcctgctcgatcagttcaccgttactgatgaccgccacgcagtcgcagatgcgtttcaccacgtccatctcgtgcgtaataaggaggatcgtcaggcccagacgacggttaatgtctttcagcagttccagaatcgaacgcgtggttgccggatccagtgcgctggtggcttcatcacacagcagcaccttaggattgcttgccagcgcgcgggcaatggccacacgctgtttttgcccaccggacagatttgccgggtagctatcctgtttgtctcccagacctacgaggtcgagcagctcggtgacgcgacgcttcacttcttctttcggcgtgttatccagctcaagcggtaaggcaacgttgccgaacacggtgcgggaggccagcaggttaaagtgttggaagatcatgccaatctgacggcgcgctttggtgagttctttctctgaaagggcggtaagttcctggccgccaacttctacgctgccctgggttgggcgctcaagcaggttaacacaacggatcagcgtacttttacctgcacccgatgcgccaatgacgccataaatttgaccagcaggaacatgcaggctgacgttgttcagcgcctgaatggttcggttcccctgctggaacactttggtgatattggaaagtttaatcattagattatttttatcgtatgtaagttagccgtggcattttcttctgccagatacgggtgatgaccgtaaacaaaacggatgttaaggcatccagacgtctaaatcaatccaactctgtacgatgagcactttattgcgctgcgattcatgagatactagctgaacatgcctttttcaggagcaaaccggtggcaaaatcagtacccgcaatttttctcgatcgtgacggcactattaatgtggatcacggttatgtccatgagattgatgagttcgagtttatcgagggcgtaatagatgccatgcgccagctgaaagagatgggctatgcgctggtggtggtgacgaaccagtctggtattgcacgcggtaaattcaccgaagcgcagttcgagacgctgacggaatggatggactggtcacttgccgaccgcggtgtggatctcgatggcatctactattgtccgcatcatccgcagggaaccgtagaagcgtatcgtcagacctgtgattgccgtaagccgcatccggggatgtttatctctgcgcaggagttcctgcacattgatatggcggcttcttatatggtgggcgataaactggaagatatgcaggcagccgcagccgcgggtgtagggactaaaatattagtgcgtaccggcaagccagtgacgccagaggctgagaatgcggcggattgggtgattaatagtctggccgatctgccaaaagagattaaaaagcaccaaaaatagcctttttggtgaaaaggtgagcggttgaaataaaaatgcatttttccgcttgtcattcctcggcggcttagtgcagccaagttcgttcccgaaccattcgtatactccggagttgaatgtatcaaaaccaccataaatatagcaaagactcttaatacctcaacccccggaattctttttgcgatcatattgattaatattcctaagctaataactaactgggcagcacagaatgctgcccaacttctaaagtagaaaatatctaacagatattagatagatagtttttttagctgatcaagtatattttcaaccaatgcaacagcggaaaaaacactgcaactttcagcataacagcgtagctcaggtgcattgcccgatgggcgcaaatgtattacagaatcatcactgagagtgagtcgaagaccatccgtggaatcgacgactttaattccgaggttaaaaccaagagaatgtacaaagtcgagcgggtcatgtaaggctttagcgatgatttctttgctcagcgccgtagcgaagttctggatgcggtctgaatgagtaaaacgctgtgggagattgtgtaacagatccgacatcagtactttcgcggtaacgctgctggcaaaaaccatcaggaaaggcagaacggcatcacgtgtcggcagtgcggaaatcgtcgtatcaccaaatgtgatgtcgctacccaataaaaaaccaccattagcttcaaagccagcgatgcgatcatagtctatgcttagcccggcaaaagcggcaataacataaggtgaaccaatctttgttagctcgatatgcttaaacaagccggattttgctattgccgtattacaactaaccgggatagcgagtgcgtcaatacccagcgccttagcacatagcagacccaagatatcaccgcgcagccattccccctgctcatcagccacaagagggcgatcgccatcgccatcggttgaaaagatagcgtcgagattaagctcactcgcccattcacgggctttctctttatcttcctcagaaacagcttcggtgtcgattggtacaaattcatcgctgcggccaatgctgataacttcggccccaagctgggtaaatattttggcataaagctctcgaccagcgctggagtgctcataaatacctactcgctttcctgccagcgtatcagcagcaaacagggaggtgtaacgcgctatgtagttatcggcggccagcgacgacgatgtcaattcaagtaatggtagttcgaggctaaaagcggactcgcactgcagaatactgagctcatcggctttggtgatttcaccatctggacggtaaaattttaacccgttgcgatcgaaggggatatggctgccggtaaccatgatggctgggaccctatcctggagtgattgattagccaacgcgggcgttgggatcactccgtaataaaccgctcttaaccctttagcaataatcgcctgagcgcaggccttagccatagcataactgctcgggcgattatcaatagctaaagcaacagtatcaaaggtaaaatcgcgcgccatgacatcaataaatgcgtgtgcaaatgcagcacagacttcaggtgtgaaatcgacaaccagacctcgtgctccgcttgttccaaacgcaacattactgtttttaatcacaagtttggaattcaacattatttattatccttaatgcgtccatatttatcatcgaatcgaacgatatcatcactgccaagataggtcccggactggatttcaatgacttctaacggcaccttccccgggttttccagagtatggacgaccccaaccggaataaacgttgattcattttccgataccaggaaaacgtcatcaccccgagtcaccttcgctgtaccagcaacgaccacccaatgctctgcgcgatggtaatgcatttgtgtcgagagacgctcacccggcttaacggtaatgcgtttaacctgatagcgccccccctgatcaacggaatcgtaacgcccccaaggacgatactcttcgcggtgtgaaatatgctcgctacgtttttcacgtttaaggacatcgacgacttttttgatattctgtacttgatcctgcttcgcaatcagcaatgcgtctttagtttgaacaatcacaagattatccgtcccaattgtggcgaccagcgaattttcagcatagacatagttattgttgctattgtgatagatcacatcaccatgggtcacattaccattgtcatctttggtagaaatatcccacagcgaactccaggaaccaacatcgcaccattgagcatccattggcacaacaacactatggcttgtcttttccatcacagcataatcaattgattcgtccggacaggcggcaaaaaccgagtcttcaagccggataaaatcaagatcagacgaggcacctgacattgccttcttacagacactgagtatgtccggacggaatttttccagttctgacaaatagacacttgctttgaacatgaacattccactgttccaaagatagtggccgtcacatagataagcttcagcagtagactgatcaggtttctcaacaaaagcatcgacttcaaagaccgactcgagcacttccttaccctgtcgaatgtatccatagcccgtttcagcatgcgtgggaacaatgccaaaggtcaccatttttccatccaccgcttgcctctgagccaaagtaacactactgcaaaacgcatcaacgttttgaataacatgatcggcggcaagcaccagcataataggatcatcgccatctcttaacgcatggagtgcggccagagcaatagccggtgcagtgttgcgccccatgggttcaagaataatatcaaagtcaacaattcctgcctggcgcaattgttcagcgacgataaatcggtgctcgttattgctgataataagaggcgtggtgcaatcgaggttttcgagtcgcaagagtgtaccctgcaacaatgaagcatcatcaactaatgacaaaaattgttttggatacagggagcgtgaaagcggccagagacgtgttcctgaacctccagccataacaacaggcaatattttcatattatgctccctctacgaccttgatgaaataattaaccatttttgacctagtataatgctgtgtaaaatactcatgaacttggtttctattaattggatgctcacgcaaataattaaaactactagctaacgcatgtgcattcttcaccgggaccaccaggccagtcagaccatgtttattgacccatgcgacaccagagcctttaatatcggttgagattactggtgtaccacaagccatcgcctcaagttgcacgacaccgtaagcttcggagcgttcaacagatggcagacagaacacatcagctgcgctaaagtatgctggcagttcatgagcggagatccgccccagcaacttaacgacatcttcaaggttatgctctttaattttcgctttcaattcaggggttaactcgccctgtccacccagcaagataatgtagttttcgtccattagtctagccgcttcaataagatactcaaaacctttgtagtagacgtgtcgacccaaagagaagatcacaaatttgccggcatagcgctgtttaatctgttcgacagcgtcaggtgaagcgaccattttatcttcgtcaataccgatcggaataacttctactttataaaggtattttgtgagatcttctgaagcgtcggcataaacttggctggttgcgatgattttattacagcgagcaagcaaatcgttttgcaaagggataaaaggaattttcaaatatttttgttttactatatcgctgtgccagtggacgataattttacattctttatggggtttaaataagaaaaaagcgagaagagcaagtggattcggtaagtgaacatgtataacatcatagttatttctaattttcctccagactttaataaattcgaaggataaataagtacttgccaaatgggcaatactggcacagcgataaaccttaacgctatcgataacttcttcagaagactgatttttttccgaaacgcataatacatcaacgtcgtaaccttcttgttttaataccgttgatatatcgtacacaaccgtctcaatcccaccccagaaggggggatataacttacttacctcgagaattcgcaccttaacctctttataaaaaataaaacctttttcttattaaggatttattattgaaatatctttttaaaatactctgcgcatgcactatcagagtaatattgaaggaaaagcttccttgttgtagatgctgtagtttgcatgtttcttaattttttaattgcgaccttatattcggataagctgttacagctgatgatatccggactctcgagtgactgttcatagccaatcaaggtgaaagatgatgcgataacctttttattatatttaagcgcctcagcaacttttactttcatacctcccccaatggagatcggggataaaatcacatcaacactctgataaaaatccgctaacgactcaacgtaaccgtaagttttaaggttaggcttatcaagctttgtagcatacgcttcaaatccgtttccagcgatcacaaactgtatttgtctatcgtcaataaatgcaggtgcgatatgctgagagatatattgtgcggcctcggtattagcatagaacgcagttccgataaaaccaacggtaaacaccctcgactgtgtggcttcagaaccatacagcaccgcatcggcaatttgttcatctacaatgcagacgggtacgcaaaagtctgcttttcttttgtaaagacgaaagagacgatccgagtccgcctcatgcagcgtaatcaatagatcactatatttgactgcttttttttcagcggatacggttgagaatagcgacggtagaaactgaattttgccgctcttaaggcgatctttttcgaaatccacttccgcattgtggaaaaaggttaaaatcttgatagttgggtacgcgctcttacaccattcggccacgctacccagcaggcttgaatcaagatataacgtagttggctgatactcatgaataattcctttaattctgctgaaaatttcagcattgagcctaccagcgtagccgcgtaaattgttgagagccgtctgtatttttgaattcttcgccagcatttcccattcgtaagcaccctcctctttcctgacgatcgcgatctctttaatctctagacgttcgttggttttcagagcttttaaatttgctcgagatacaatgcttccgccataattagacttttccagagacattgagatatacagtaatttttctttgatcattatttaccgtctatgaatttgttttagataatttacgacaataaaaggcaatagaaacgcatataaaacctctatattaacagcgaacaaaattgatagcagcgagtaccaaagcgttatccgcagcaatattttttggtagtaacctgcattagtctcctgaacgtcccgaaaagcatttctaaaaacaataaagtagaaaatgacagccataaagccgctatgaataactgaaaagagaatacctgattttgccgaaagataattacctgtatcgatcatatcattaatttcggacagattaagcgaaaacggagccagattattgcctatgctgatcgctgcctctagtgggtgcacgaaccatgcagtgtaggtaccatacccctcaccaaggggatagtagaataaactacagacggcccatagcgaggtgatcagccgtgtgctaacgctggtgaaattttgaatatcaaccatcaacgcaggaagcactgtatgaataatagtataaatgactatccctgcaatcggtatgagtgcaaacagtgattttaatttctgaattaacgtcatgttgaaatagaataccagcagtccgccaaacatgatcagcaccaatgaggactttgagccaatcaacatgttacccgctagcagcgccccccaaagaatgagtctgaccaggttaactttgctgagggtaatcgccagcagtaaaaatatattaaacgtaaaagcggctattgacggttcgggcgagagcaaccgctgtcgcgatcccacaccatagccttccatgctaaggtggaacggtgcaagcacatcaggcgcaacgaattctataacaataatcaatgtcataataaacgcgattaaaataaccgttttgctcaaaaacgttccgcttacggagcgtagaacatagcctgcacaataaacagtcaaaaaatagaaaaaataataagaagaggcaaagatatgcttactgagtacagacactccgtaagaatttaatatagtcccttcaacgatatagtaccagacacactggataagcgagatgcaaaacgtcagcaaaaaatagaacataaaaagtcggctgtacttatctaagtacagccgaaatttattttgaataagaaatagtataaagataaccgctgacgctgcccacattggactagcacccagcatgcctaaaaacgcctgcaccggtaaatcgttcagggtcatcgacaggagaattatcattaagcacattgatgcaaatacatactttcctctacccggagcgcttatttcaattccattcatattggtattcatgaattaatgccatttatactaatttatggcgcttgcaaaaagtgtagagcctgttgcgcagcgagttataaattctgtttagtttaccctgatagatatcgtttacagtgagaccatttatcagtgccttatggctcaacagcttttcatttataatggctttgagcttaaatagtagaattgctggagagcttttacccgcattgtaccaaccatttctgtttatagggaaaagccaatggctaagatgctgattgagattttccgagaagaaagacacattgaccctacgctgtttaagaccgtcgttgatctgtacaaattcttgatcatctattgtctgtacattatttaaaggcataagcttatcgatattttctcttcgactcagaaatacgtaggaagagatccatgcggttaacggcaactgattgatggtaaatgctgttctggtactgtttaactcgccatagaaaccattcacggtacagtgtgcaaccgccttgcggtagagcattctatcatagaaggtaaagaagcgatggtgacagaaagtatcattcataaacaaaatgatatcatcattgtctattgttccatcacccgtaagaagagtgtagccttcatcccatgcagagaattctccggctacattgctgcccttgagccactgtacattcgctgcaggctcattttcagggatcagcttaccactattatctacaaataaaatatgaaaatgctcattagcaaaaatagagaagatctcttttctcactttttcataatagtgggggtaataaagagcaacaataatattaactttcatagttatattttatctgtaaataaatccagcggcagcattgccagtttttacgtttagaattaaattgtgcacagttgtcgtttcagcaagctttggctaataatcgtcagaattatccagtccacgatgaccctaatactccaggcaaatgcaacaccaatcagcccataatgctgtacaaaaaaatagagcattacaaagtagggtataatctcaacacagtggagcaaagcagtaattttagctttacctgcagactggattgccgtaaagggaacctgagcaagcgcgttaaacaagaaacctaccagtaagataatcaaaatattctttgaatgtgccgcgtagcttgtgcctaaccacagatgtaaaatgttttctgcaaatactattccgataatcactaccggcgcgcagacggcaaacatcagtagccaggagactgtcatattcctttttagttcatctttatgtcccgcgcagcttaattttgggaagattgccctgcctactgcggcaggcaagatccccaaacgggcaatggcttccgaaggtccagagtagtaagcaacatgcctggcgcccaacatatttgaaatgataaaacgatcaaaatagaccatcgctggactgataatgttactgaccgtgatccagccgccaaaaaaaattagccgtttaaaagtgacgaggtcgaggcgcattcctgactgaactatttcgttacgtaccagcagaaaggctatcagcaacgaaatgatgcgagaaataagcagccctgctatcgctgagagaagcgttccatcaaagatgacaaatagcgcaggcattccagcaatgaatgtgctgctaaatgacttttgaatattaactgctttaaacttttcatcgccctcaagaatggctatccatagctgattcagtaaaaatatcgggattgtcagtgccagtaacttaaaggagttgttgatatcgacaaaatcagcagctgttatgttgagaaaatgaactatagaagcagagaagatctgtaccagacatcctcctagcgtacttagcgccaataggaatacggtagcgctggcaatgatttttttccgttcagcgctgttatttcgataaatagcaatttcccgggtaattgcgcgagtcaatcccatatcgaaaatgcctgcatatcctaccaccgcgattgcgatggtgtagataccaaaaagttcaggccctagtttgtgtgccatatagcccagagcgggtatagcgacaagcgacgggattacgtatcccaccaagttccagatgctattcttaattatgctcatataaaaagctcattcaccggaatagaattcagctgtggagcggcttcgtccttgggcgagagcttgagattgacattaaacggccactgaatgttgagttgcggatcgttgtagcttacggcgcgctccaactgcggctggtaatagtccgtggtcttgtagacaaactccgccgtctcgctcagcaccagaaaaccgtgtgcaaaaccttctgggatccagagctggcgtttgttttcagcagagagatttactcctatccactgaccgaaggttgttgacgatttacggatatctactgcaatatcaaagacttcgcctataatacaacgaaccagcttaccctgcgcgtgcggagccaactgatagtgcagtccgcgtagaacccctttactggatttcgaatgattatcctggacaaactctacctggcggcctactgtctcttcaaaaacacgatggttaaaactttcgtaaaagaagccacgatcgtcgccaaataccttcggttcaaaaatcagcacgtcaggaatagcggttttaatcacgttcattgcttagtaacctttaatcatttttagcaggtactgaccataagcatttttagcgagcggtgccgccagttttttaacctgatcagaattaataaagcctttacggaaagcgatctcttccggacaggataccttgagtccctgacgttcttctattgtcgagataaagttacttgcttcgatcagactttgatgagttcctgtatcaagccaggcatacccacgccccatcatcgcaacagacaggcgcccttgctccaggtaaatacgattaatatcggtaatttccagctcaccacgtgctgatggcttcaggcttttcgctatttctactacatcattatcatagaagtagagtccggtaacggcatagttactcttaggctctaaaggtttttcttccagactaattgcggtgccgctcttatcaaactccaccacgccatagcgctcaggatcgttaacatgataggcaaagactgtagcaccttcgtctttatttactgcggcttcaagttgcttcggcaggtcatgtccgtagaagatattgtcgcccaataccaaagcgcaactgtcttcgccgataaactcttcaccgatgataaacgcctgcgccaagccatctggactaggctgtactttatattgtagattcagcccccactggctgccatccccaagcaattgttcaaaacgtggtgtatcttgtggagtgcttataataagaatatcttttatccctgccagcatgagtgttgagagtggataataaatcattggtttgtcataaataggcagtaattgtttactcaccgccatggtcacagggtacagacgagtgccagaaccaccggcaagaataatacctttacgcgtagccatcattttttctctataaaaaaccaaatgcccatataagagcatttatctcattaaattgattgtgccgaaaaaagctcggtaagcatccgttttacgccaatatcccaggaaggaagtacaagaccaaaattcgtctgaaacttctctgtgttcaagcgtgaattatgcggtcgacgtgcaggagttggataagccgacgttggaacagcattaagcttttcaatagccaactcaatatctgcttttctggcctcatcaaagaccagtgccgcataatcataccaggttgtcgtatttgacgcgaccagatggtagaggccagcaacttcaggctttatcattgcgacacgaatagcatgcgctgtgcagtctgctaacaactcagcgccggttggggcaccaacttgatcgttgattacggagagttcctgacgctcttttgcgagcttcaacatcgttttagcaaaattattgcccttcccagcatatacccaactggtacggaaaataagatgcttaggacaatgcgcctgcaatgccttttcaccttcaagctttgtctcaccgtacacattcagcggagcagtcaagtctgtttcatgccaaggcttttcaccgtcaccggggaatacatagtcagttgagtaatgaacaacccatgcgtctattttggcggcttctttggctattgcttcaacgctagttgcgttgagcagtctggcaaaatctggctctgactcagccttatcaacggccgtatgcgctgcggcattaacgataacgtcaggtttaattgtacgaaccgtttccgcgattccttcagggttgctaaagtctccgcaatactccttagaatgcacatcgaccgctatcaagttacccagtggagcaagcgcacgctggagttcccaccccacctgccctgttttaccgaacagaagaatattcattattaacgttccccgtagttctgctcgatccaacttttataagcaccacttttcacgttgttaacccaattctgattgctcaaataccattccaccgttttacgaatgccgctttcgaatgtctcttcaggcttccagcccagttcaacgccaattttatgcgcatcaatcgcatagcgccggtcatgacctggacggtcagccacatacgtaatctgatcgcgataagacccctcttttggcacaatctcatccagcagatcgcaaatcgtatggaccacatccaggttctgcttctcgttatggccacctatattgtacgtttcacccggttcaccctgagtgacaacggtatagagtgcgcgagcatgatcttctacataaagccagtcacgaatctggtcacccttgccgtaaataggcagagctttaccgtccagtgcattcagaataaccagcgggatcagtttttccgggaaatggtacggtccgtagttattagaacagttagtgacaatagttgggaaaccgtaggtacgcagccaggcacgaaccagatgatcgctggaggcttttgatgctgaatacggactgctgggcgcataagccgtggtctcagtaaagagtggcagctcagttgacgcagggtgctcatccggatgcggtaaatcaccatacacttcgtcggtagagatgtgatggaaacgaaacgctttcttcgcctgctcatccaactttgaccagtacgcacgagcggcttccagcagcacataagtgccgacgatattggtttcgataaacgctgccggtccggtaatggaacgatcgacgtgactttcagcggccaggtgcatcaccgcatcaggcttatgctttgcgaacatgcgatccatggcgtctttatcgcaaatatccgcatgctcaaaaacatagcggtcgctatcgctgacttcactaagcgactcaaggttgccggcataggtcagcttgtccacgttgacgacgtcgtcctgggtatttttaataatatgtcgtacaaccgctgagccgataaagccggccccgcccgtcacaagaattttcacgttaactgttccgtctagtgtatatgtctggatactggcgctctgaaaactgagaatttataaccagtttcagaaaatgagcacgctaccgcccctggcttaacagctaccagtgcactgagcgatgtttgattaaatgatttttcttgtctggatacagacaaaaaactggcgttaattgtcgtcctaaacgacctcagaaacaagcacaaatcgctacaaagcggtccagatttaaatcagataactctatgtaatcctttaatttataacaaaaaacggcagtcatcattttggttagagatcaacacaccaaaataatgactgccgtttgttcaggtcgagactgaaatatcagtcgttagccagcaatttctcaatccggtttctgaacttcgccccttccttcaggttgcgcagtccatagttcacgaacgcctgcatataacccattttcttaccgcagtcatagctctcgccggtcatgagcatcgcgtcaacagactgcttcttcgccagctcggcaatcgcgtcggtgagctgaatacggtcccaggcgcctggctcagttttttccagctcggcccagatatccgcgttcagaacataacggcccaccgccatcaggtcagaatccagcgtctgcggctgatccggtttttcgatgaactccacgatgcggctcacctgcccttccgtttccagcgcttctttcgtctgaattacggagtactcggagaggtcgcctttcatgcgcttcgccagcacctggctgcggcccgtttcgttgaaacgtgccaccattgccgccaggttgtatcgcagcggatcggcagacgcgttatcaataatgatatccggcagcacaacgatgaacgggttatcccccaccaccggacgggcacaaagaatagagtgtcccagacccagcggctgcgcctgacgcacgttcatgatggtcacgcccggcggacaaatagactgcacttccgccagcagctgacgcttaacgcgctgctcaagcaacgcttcgagttcgtaagaggtgtcgaagtggttttctaccgcattcttggatgagtgcgtaaccaggacgatttctttgatccctgcagcaacaatttcgtcgacaatgtactgaatcattggcttatcgacgatcggcagcatctctttaggaatggcttttgtggcgggcagcatatgcatgcccaagcctgctaccggaatgactgctttcaaattaatcattttttcttccaccttaaaatggttgacgaattatagctcttaaacctgttttcgccagcatgatttgccgtaatcctgaagcaatgttacgccttagcatcacatatttctgtagttgtaatctgattcgatcgcgcttatatgccaggaatcgtcttaaaacagattattgtcgattatctgtgcggcagcgcaaagttcagtctttccacattcaccacctgctggtcgacccggtcaatatccaccgagctttgccccttctcgttcacagctttgatgttcgccagcgaaagcagcgtctcgtctttcgccataaatttacctcgtacatctttgcgcagatcgaagttgatcttcagggcaggacccacggcggcttcctgcatcacattgatattacgtaagaaaagatgcttcggcttgttgtgcagttccagcgttgcgcgctgcatttccacattggtaatcgccacaaacgacgtcgcattaccggatgaaatctgtattccgcgcaatttataggcgagctggcggttatcgagatgaatattattgagcttgaagttctgcgggatggacaaataatcgccttttatgaccccatagccgattaacattcccgcgctgttgaccatgtcgacattatcaataatgaaattatcacagccataaatcgccaccgtggcgttgtctattcccgcctttttactgaagtctggggtgatatttttggccttaatattgcggataacaaagtgcttcccgttttccacatgcaccagctgacgacagttgctgccggtgatgttggccaccacgaagttcttaacggtttgcttttccgggtagtcgttgtcgtaggtgctcccggcaaggccaatgccgatgccccagttgatcttgccgttagtgcagttgatgttgtcgatgacatgatcggagatcaggatattgcgatcgttgatggcgacgttccattcgatcgcatcgccctgcagatggctaaatttgctgttggtgatgcgggcgccgtccacctggttgtggaaaccctggcgcaggatggcgtagttggcctgactcacgctgatattatcaatcaccagattgcgcatcacgctcggtttcttaccgccgatgtagatttgcgtcacagggccaaaaccgctcatggccagccctttgatgacgcagttagagccgcgaacgtcgagcgtaatgttctccgtgcggccagcgccttcgcctaccactttgctgccttcctgcagaacaaagcggccgcggccattgccggttaacgccccgcgaatcagcagcgttttaccgtcgggaatgaaaatacccgtgttgatgttttcacaggtcagcccggcagggacaacgaccgtgtccccgtcattaaacgcctgcttaaaggccgcgatccagtcgttgttattgtactgattaacagagaccgttcttccactcgccgcccgcgcaatgcgggacgacagcagcggcgtagccgccagaacggacagagacgagacaaaggtgcgtcgggtaatctttttcagcatacatcctcggcgttacaacgtttgcagcaggctggctaactgacggttaatcacctgctggttaaaatcggcttcaactttttgtcgggcattgtgcagcacgggctccagcgcctgctggtcgatatcgctgaaggcagctaagcgatcggcgagcgccatggcgttattctccggcaccagccagccggaatggtcagacttaatcagctccgggatcccgctgtgaatggtcgagaccacaggtatcccgacggccatcgcctccatcagcgccaccggaatgccctccatatcgccatcggcacccgttacagaaggcagcagaaatacatcagcctcatcaagcatggccttgacctcgtggctcggcttgaagcccggcatctctacaacatcttccagctgatactgttcgataagcgtgcgcagacgacgctcccacggcccaatcccgagaatgcggtagtggaaatccaccccgcgcgctttcagctggcggcaggcttcaatcgccacatgcaggcctttcttctcggtcagacgcgcgacggagatgatctgcagcggtttacccggcaccttcaccggacggcgggtaaagcgcgttaaatccacgcccatgcgcgacacggcaattttctctcccgggcagcccatgcttttcaggcgtccggcccacagttcactgatgggcagcatcatgtcgccgcggcggaaaagctgctggtactccggcgtataatggttcagcacttcacggctggagatgtcgataccgtggaaaatggtcgcaattttaccgtcaatcacgcccagttcgcgtagcttcgcggcggtcacgcctgccgggccaaagtgggcgataaacacgtcagcacgatacggctgcgccgtttgcccgcagatggccgagagaattaaattgcgtgattccgacccatagcgggaaacattcagcgcccgccacgtcgacgcgcgatggatcccacgtaaggtctggctggcgcggtggcgcagcttgctcagcttcccggacggctcgtcctgcagccagcgggtttttgcctccagcccatactgggtatacgccgcatgggtgttttgggtatcgcccttttgcagggcgataatctccacgtcatatcccatatcgataaacgcggtgatttggttcagaacaaaggtctcagacgacagcggaaatttcagtaagaagaaaccaaccttcatttcccctcccgcacgcggtcaagtaccgatttcaccatcccaatgcccttctcgcgctcggctttcaccgccaccgccagacgttcattgatcgcaggcagttggccgagcgtgtcgcccaccatggcgccgagcgatccgtccagcagatgacggatatccaccgccatttccggcataccgagctgctgcataatgcccgcggacttgtgctcatagttaatggcaatggccggcgtgccaaagttcatggagataatggccgagtgcaggcgcgtgcccaccgtcaggtcgcaggcggagagcagcttgcccatctccaggtcgttcagctcgtccatcaccacgtgatagcgggacggatcgttcaccaggttgcgcaggttgagcgccaccatgcggtcatctttgttgtagctgtcgataccggtacaggtggacagcgccagcacctggtacccgctgtccagcactcggttcaccacgtcggcgaacgcttgctcatacgccgcctgcgtcgtgcctaaacgtttatcgaatggcgccagctcgcgcagggtgatcgcgacggttttctgtttcgccgtaacgccgagccagtgctgcaccgcgtagctcggctggaagctgtcgtcctggtgatccaccagccaggcggtatccacgccgtgctcaactttcgacgtgtcaatctcgctgcgcttcatcatgtcaaggctgaccgactcacgcaggatcagggcatcgcagtggccaaacacatagttcgccagctggttaaactgcggatcctgaaaaggccccacgctatggccaatcataaacagcggctttttcgccatgaacgtacaaagcgcatgctcaaactgcggcacgccgtagagatcgacgaagaacgaaccgccgacctgaataatggcgtcatagccggacagcagacgaacaaagtcggtaaagccctgcgcgatggcgatgttgcgcagcttgccggtatcggtcacgcgggaaagcagcacctgatgctggtagcgacgacgcagtactttcttcacgcggcccatcacgcccgcggcgttgttatgctgtttcatctggctgtagagcggatcgcccattaccgggcggttcagtaaccaggatgagctgacaggataacggctcatcacgtccacttcggtctcaggcttaagggtgttaattgcatccagtaaaccgcgcaggatggcgctgtcgccacggttgccgcaggtatggttgccaagaattaataatttcataatggcctcttaaataactagcctgcgcgaagcagcgttttcattttttcgttacggcaaaactggcgcttcatctcaaccacgagcgcattgcgcgacagcacaatcatcacgccaaatgccagcgcacccgcggcaacctgcaccgccagcagcgcggccagcggcagatgcccgctgaggataatgcccaggccgtagctcaccgccagggtcggcaatgagagatagaacggcagccacaggctcaggatgtactgacggtagctggagcccagcaccggtttaatcatgatgaagtagctcaggacggtattgacgatctgcaccagcaggaagcccagcgtcacgccaatagcgcccgccatgtgcccgccgacgataattgccggaataaacaggaaggttttgaatacgttgaacttaaagctgatgtccacgcgcgcttttgccatcagcagggacccaatcgggttccccacggagcgcagcagccccaccacgcacagcagctgaaggatcgggataataccgttccatttctcaccaaacaccagcggtacgaagttgctggacaccaccatcagccccagcagcaccgggaagttgatgatccccaccaccgaaagcagcttgtaaaagttaatgcgcagcttttcggtgtcgtcctgaatcttggcaaacgccgggaacagcacgcgggtgattattgggttcagcttcatcggcggcaccaccgcgacgttgtaggccaggttgtagccccccgccacgctcgcgccgagaatacgtgccagcaccagcgtcgaaaggttggtgttcacgtagttgataatgctgtccgccgtcagccacgcgccaaagcgcaggttggacgagacggaggcaagagagaaatgcagtcccgggcggtaaattttacgcccaaagtagccgaacagcagcgtgcgcacggcagagttcaccaggtaaccgaggatggcggtcatcgccagcggccagaaatgggcgctcacgacggtaaaggtaaagcccgccagcacggcgctggtctcgatcatgccgatcttattgaactccagctctttctgcatcagcgcgcggaactgctgcccgtgggggatcaccacgaacgcaaacgacagcgtacgcatcagcggggcgagatccgggttgtgcagcacgctggcgatggtatcgctcagcaggaacaccagcacaaacacgaaaatccccagccccacgttcagccagtagagcgtggtcagctcaagatggctgatctctttgcgctggataatcgagttggcgataccaaagtcagacagcgtatcggccagcgcaatgatcaccagcgagacggtcagcaggccgaactggtgattatcgataatgcgcgccagcaccgtcatctgcaccaggccgaggccaatgatgacgatggtcgccatcgctgaccacttggcgccgctgatggttttttcacgtaagctcatcttagtacgccgctttgttcacgaaacctttgaaaatggtcagaaaaacaatcttgatatcgaaccagaggctccactcgcggatgtactccagatcgaactcgatgcgtttttccattttttccagcgtgtcggtttcgccgcgccagccgttgatttgcgcccagccggtgatgcccggcttcaccttatggcgcagcatgtagccttcaatcagcgagcggtactgctcgttgtgcgccactgcgtgcggacgcgggccaacaatcgacatcccgccggtaaagacgttgataaactgcggcagctcgtccagcgaggtgcggcgcaggaagttccccacgcgggtgacgcgcggatcgttctgcgtggcctgggtcaccaccttgtcgttctccatcaccttcatggagcggaatttccacaccataatcggcttaccgtccatgccgtagcgggtctgacggaagataaccggtcctggcgagctcagcttcaccgcgagggcaatgcagcacagcaccggggagatgagcagcaaaatcagcgaagagagcacgatatcttccagacgcttcagcacgcggttaataccggacagcggcgtgtcgtacagcggtacgaccggcaccccgttcacctcttcaatacgggagtgaagaatgttgaaggtaaacacgtccgggatcaggatcactgaacaggtggtatccgccagctcgcgcatcagctgcttaatgcgggattcgtctttcatctgcatggcgatgtagacgttgtgaattttgccggctttggcatcgtcaatcagctgatcgtagttgcccgcccagtcggcaggcacgccgccaggctttgcgtcgtgataaatcccgaccacttcaaagcctaaccacggctctttgcggaagctgtcgagcagcactttcccaaccggcagatcgcctgccaccgccacgaagcgacggttatagccccggttgcgcagccaacccgcgccaaagcggatcagggaacggcacaccaccatgccgacgctggtcaacagataccagctcagataggtcacgaggcgattatcaaaatcatggctaaatgccaccaggcctgcgctgaagatcaggctcagggtccagttctgcagcagcagcatcagttcagtggtcattttgacgccgcgccacgagcggtagaaatcggtcataccgccgatcatttgaaacacgaccagcgcaatcagggccatcagcagatgcatatataagaacggcagcccgctgatccgacacaccgcccacaatccaccgaccatgatggtgatatcagaaaaacgctgcaccatagagattaacgatgcattcgttctcgctcgttcgcgtttttttagattcgtcatcgttgttcctgtattcggttccccctcccaccgggaggggcagttattactgattcaacagcgccagaatgtccttcgttcgggcttccatgagcgcggtgtcagcgcgggactccacgttcaggcgcaccaccggctcggtattggacgagcgcaggttaaagcgccactgcgggaacgccatgctgatgccgtcggtacggtcaatttccagcgcgtggatggcaaagtgccgctccacgcgggcaatcgcctcggcaggctgtgccagcttgctgttgatctctccgctcgccgggaacgccgccatacggtcgcgcaccagctcgcccagggttttccccttcaggcacagcagttcagtcaccagcagccacgggatcatcccgctgtcgcagtaggcaaagtcacggaagtagtggtgggcgctcatctcgccgccgtagatggcgtcttcttcgtgcatgcgctctttgatgaaggcgtgaccggttttggacatcaccggcgtgccgcctgcggcagaaaccacgtcgacggtgttccaggagaggcgcgggtcatgaatgatcttcgcgccagggtttttctcgaggaacgcttccgccagcaggccgacaatgtagtagccctcgatgaactgccctttctcgtcgaacaggaagcagcggtcaaaatcgccgtcaaaggcgatacccatgtccgcgccgtgttcaatcaccgcgttgcgggtgtcgtcacggcactccggtagcagcgggttaggaatgccgttcgggaagttgccgtccggggtgttgtgcactttgacgaaggtcaccggcacgttcagtgctttaaagcgcgcttcaagggcatcgacaaccgggccagccgcgccgttgccggagttaatcaccagcttcagcggcttcaggtttgccacgttgatgtagcccagcaggtggtcgatgtactctttctgcaggttgatttttttgtagctgccgcgcttcgcctcgttcaccggcgggaaatcgttggcttccgccaggcgctgcacgtcgcgcaggccggtgtcgccgctgataggacgggcgcccttgcgcaccagcttcatgccgttgtaatccatcggattgtggctggccgtcacttcaataccgccgtccacgcccaggtggaaggtggcaaagtaaatctcttcggttccggaaagaccgatgtccagcacgtccacgcccgcgtcctgcagccctttcgccagcgccagcttgagggattcactggtcagacgcacgtcgccgcccagcacgatggtctgcggttttaagtattcgccgtacgcgcggccaatgcgccacgcaatgtcttcattcagctcttcgcccagcttgccgcgaatatcgtaggctttaaaacaggttaatttatccatgatgacccctttttcaggcaacagtcggtcctgaccactaaatggccaaattaatttttttgtcattcgtaggcccggtaagcgcagcgccaccgggcatgatgcagagagctacactcgcccgtagcggtcctggaagcgcacgatatcgtcctcttccagatacgagccggagcgcacctcaattaagtcgagagggattttccccgggttctccagacagtgcgtcgcccccagcggaatatagatggactcgttttcgcccagcagtttcacttcaccgtcgatggtgactttggcggtacccgcgaccaccacccagtgctcggcgcggtgatggtgcatctgcaccgacagcccctcgcctggcttcacggtgatgcgtttcacctgatagcggtcaccggcgtcaatggagtcatatttgccccacggacggtagacttcgcgatgaatgtggtgctcgtgacggccatccgccttgatcttctccaccacttttttaacgtcctgcacggcgttacggtcggcaatcagcacggcgtctttggtctggaccacaacaagatcttttaccccaaccgtggtgaccaggccggactcggcgtagacgtagctgttttccgttttgtggctaatgacatcgccgtgatggacgttaccctccggggtatgggcgctgatctcccacagggaggaccaggatccaacatcgctccagcccgcatccatcggtaccacgacggcgtcagccgtgcgttccatcaccgcatagtcaatggactcttccggacaggcgaggaaggcctcttcatccacgcggatgaagtcgagatccggatccaccaccgccatcgctttctcgcaggcgctcagaatatccgggcggtatttgcgcagctcttccagatagcgtccggcgcggaacaggaacatcccgctgttccagtaatattccccgctggcgacatacgcctgcgcggtttccagattcggtttttcaacgaactgcgccacgtcaaacgccacgctgtcgccttcacccggcgtcacgttgccgcgacggatgtagccgtagccggtttccggcagatccggcacgatgccgaaggtcaccagcttgccgctctcagcgtaaggaatggccgcacgcaccgcgtcgcggaaggcctcttcctgctggatcacgtggtctgccgccagcaccagcatcagcgggtcacagtccgggctactgcgttttgccgccagcgccgccagggcgatagccggtgcggtattgcgtccggcaggctccaggatgatattttctgtgagtttgttcagctggcgcagctgttcggcaacaataaagcggtgttgttcgttacagatcaccaccgggctttcacactccacgccgtggagacggtttaccgtcgtctgcagcatggtgagatcccctttcaggcagaggaactgttttggatagagcacgcgggacagcggccacaaccggctaccagagccaccagccatcacaaccggatacaaagtggtttgactcatgatttatccccgtatatctgcaataaattggctcagcacgttctctttctcgagcgtgcgttcggcatattcacgtgccaccgtgttcacttttggcatggcaagtgcctgttcaatgccggtgaccagcgccggaaccgattccggctctacgcacaccgcaatccccggatagctgtcacacagctggcctaattcagtttcggcttcggccgtaatcaccgcgttaccgcccacggccagaatgttggtcagcttggacggcagcaccgcatccgccgcgccgcgcttttgcaccaccagatggcagtcgcccatcttcagcagcgcaggcaatgcctcgtaagactgaagcgggaagaatttcacgttggtcaggccgcgaacgcttaccattttttccagccgcgcttttccaccgccctgcccgacaatcacaaacatccatggatgttcgttcagcagttgagccgcctcgatcacgctctccagcccctgcttttcgccgatattgcctgagtaaagaatgattttttgatcttcaggcaaaccgagctgcgcgcgcagcgcctgagcgtcttgctcagtcacgtcgcgaaagcgcgccacttcggaccagttcgggaagaagatcaccttctccgccgggacgcctttctcctgcgctttgttcatcatggagcgcgagatcgttgagacgtagtccacgttgtgtaagccactgcgctcaaacgcgctggcgagcttcgccaccttgccgcctttgcttttgcctgccatccccaggcccagcatggcgtccacttcataatcctgaatgtgcagcagggtgcgcgcgccggagagtttgcccagcaggcgcatgcccggcgtgcaaaacagcgtcggcaccacgccgataatgcgatccggcttccaacgacgctgcgccatcagcgggaagaagctgctcagggcaaagctgccgagatgaatcaagcgcttcagcgtcgagggctgcttaggcacatacagcgggcagcgccagacggttgctgcaccctcttcgcgacggtagcgccagctggagtaacgctcccccactttccactccgggtagtacggcggcgcggtaatgacccgcacgtcatgtccctggctcgccatccactcgaccatctcgccggtatattttccgatgccggttaattccggcgagtagttgattccgtatacgaggatcttcataagcccggcaccccggactgacgttcagcgaggaaataggcacggctgttgtcatgcacattgtcgctcgccagcagcgcctctggcgtctgccagcggtagtcgtcatgctgagaatcaggcagacgcaggtctgcctcactcaccttcaggcggaaccccagcacgatgtagtgcgtggagaacccggtacccgaaaagttatcgtcatagaagtgctgccagaccccgtaaaactggcccgctgccatcggcaactgcaggcccagttccgccagagtgagacgctcaaacgcatcggtaagcgtctcatccttttgcacgcgcccgccgggcacgaaccagaagccctgcgcaggacggttggttcgtttccccagcaagaactcgccgcgttcgttctccacgatcaaatcaattgagataagcggagtggaacgcactaccgtggcaaaatcttcctgacttaaaaacatcgttacccccggaatcgatgctggttttccaggaaccactgataggtgctggccagcccctgctccagtgacacctcgtgataccagcccagctgatgcagacgggtcacgtccagcagtttgcgcggcgtgccgtccggtttcgtggcgtcaaacaccacgcggcctttgtagcccaccacctgcgcgatggtctgcgccagctcgcgaatggtgcagtccacgccggtacccacgttgatgtgcgacagcatcggctcggtgttctcctgccacacctcgcgatccagctccatcacgtgaatgctggccgcagccatgtcgtccacgtgcaggaattcgcgcatcggcgtaccgctgccccacaccaccacatccggcgcgttctccgcggtcgcctcgtggaagcggcgcagcagcgccgggatcacgtgcgaattgctcgggtggaagttgtcgtgcggtccgtacaggttggtcggcattaccgagcgatagtcgcggttgtactgacggttgtaggactcgcacagcttgatcccggcaattttggcaatcgcgtacggctcgttggtggcttcaagcgtgccctgcagcagctcgctttcagcgatcggctgttttgccattttcgggtaaatacaggatgagccgaggaacagcagcttgttcacgttgtgcagatgcgccgcgtgaatgatgttgctctcaatcatcatgttttcgtagatgaaatccgccgggtaggtgttgttggctacaatgccgcccaccttcgccgccgccagatacacctggtcaatacgttcgttcgcaaagaagtcctgtacagcacggctgtcgagcaggttcagctcgtcgcgcgtgcggacaaccacttcgacgtcaccgcgctgttcgagctggcgaacaatcgcggaacccaccattccgcgatgaccggcgacaaaaatacgttgttttgtcattctcaggactccagcgcgatggcaacctcgtagccatgagatttgagcagggagtgttttttcgctgcttcaagatctttggctaccatctcggaaaccatctcctgcagagtggtttctggtttccagcccagcttctcgtgcgctttggttgggtcgcccagcagggtttccacttcagcaggacggaagtagcgtgggtcaacctgcacaatcacgtcgcctggcttcacgcccggtgcgtcatggccggtcacggaaaccacgatgcccttctcttccacgccggtgccttcaaagcgcagcttgatgcccaattgagcggcagccatttcaacgaactgacgaacggagtactgcacgccggtggcgatcacgaagtcttctggctgttcctgctgcaacatcatccactgcattttcacgtagtctttcgcatggccccagtcacgcagggaatccatgttgccgaggtgcaggcaagactccaggccctgagcgatgttggcgatcgcgcgggtgattttgcgggtcacgaaggtttcgccgcgacgcggagattcgtggttgaacagaatgccgttacaggcgtacatgccgtaggattcacggtagttcacggtgatccagtaagcgtacagtttcgccacagcgtacggagaacgtgggtagaacggcgtggtttctttctgcggaatttcctgcaccagaccgtacagctcagaggtagatgcctggtagaagcgggttttcttctcaagaccaaggaagcgaatcgcttccagcagacgcagggtacccatggcgtccacgtcagcggtgtattccggagactcgaaggagaccgcaacgtggctcatcgcgcccaggttgtagacttcatccggctgcacttcctgcaggatacgggtcaggttggaggtatcggtcaggtcgccgtagtgcaggtggaatttcgggttcgccgcgtgaggatcctgatagatatgatccacacgttcggtgttgaaagaagacgcacgacgcttaataccgtgtacttcgtaacccttttccagcagtaactctgccaggtaagaaccatcctgtccggtaacgccggtgatgagagcgactttagacatgtttatattcctctacttatgaatttaatcagtttcaacgcgttcgcgtatcaccactgcggggttgccacgacaaattttatttgccggtagcgatttaaaaacgctgctgcgggcaccgactaccgtgccatcgccaacagaaacacccggtgcaacaaaaacatccgttgccagccagcatttttcaccaatcacaataggcgaagcggtaatatcaaaatgctgactcataaagtcgtggctgccggtgcacaaataacatttctgtgaaaccaccgaattcgcgccaatcgtaatctcgcccagggtatataacaccgcgtcatcccctacccaggcgtaatccccaagcgttaatttccagggataggtaattttcaccgaaggacgaatgactacgttttttcctatttttgcgccaaacagacgcaataaaaatgctcgccagcggtacagtatttgcggtgaccaggcaaataaggtggcctgaaccgcccaccatagctgcactttaataccgcccgccccccgaaaacctttcggtacggagaaaccgttcagatcctgcattacgtttccttatattcaggctttgttatataaggctttcgttttactcgtggtgcgcacgcgtaaaaaataagataattccgcccagaacccaggcacgcgtaatattttacgctgcacgtttttggcatcctggcacaactccagattattcgaggttgacaccccccccattgaaaactcagataccagccctttaattcggcggaacgggtaacctgacttatacagactggcggccagtgcataatcggatgacactttatactgcaaatcgtaaggctgttttttcagaccttttaccgggaagaaaatggcctgatggctggccggtaagctgtggtagatataccagcccggcttcgcgctgcggcgcactttatatccgtcgccaaaatcaagcagcgcatcgccaatatacatggcgtcctctttctggcgcgccagctggcgggcaaacagcgccacgtcgtcatggaagatatcacccgaattcaggaagatggcataacggccttgcgccatgttaatgcctttgttcattgcatcgtagatgcctttatctttctcgctgatgtagcgtaagttgaactcaccgttgagtttttccagaaactctgccgtgccatcgttcgagccgccgtcgaccacaatccactcaaaggtgaggcttggatcgcgcgccaggttgcgcagcgagcgccaggtttttaccaccccttcgtaattacgaaaagcgacagtaatgacgctaagaaacataaatcacctcatttcgtcatacgtgcgtaatattaagcgccttgcgcagaataaacggacagacaatcaagaaagcatattccgggctaaatattgacccggtaaaaaacagcgacaccggcgtaaacagataaagttgcacgcgaaagttctggttatcaccaaacgcgttaatcatcattttgaaaactttaaacagataccacagcgtcaacagtacggcgaaccacgaaaaataaataattaacagatacagaccattgtctatggttttaccgacatccgcaccgttaaagattccgaatgatgcaacatattcgtaaagtgagccgaatcttactacaccatcaatatgggttaaggaataacccaccatcaccagtggtccaatgatgcgataataggacgaggatccttccgttcccaaatcacccagacgttctgagatgtaggggaaggcaaatatcacgcccaccataaataccgtcagggagataatcgccagcggcagttttttcttaatcgcatctttgttcaggtactgaaacgcccattccagcaggtaaaacaggataaatgtcattacccctgagaacgatccagacagaacgattcctgcaagaatcatagcatcggtcttaggcgttttgataccaaactgtttgatgctgagccaaattgagattaacgccaaagcgaaaaacgccggttcaaaatagagggccgtggtacgcttcccgccgaacttgatgaagttcaatacatagctgttgctgtaaatgagatatttcgaaattatctccatcaggctgctgccgccggtaagaataatttgcgccatctccatagcagcaagcataacaattaacgcaacggcaatataaaagaacctgaggattttccgataattgtgcggagaaatcgttttaaagcgaatactccagaccattccgataataatgacaatataaacaaacagcatggtcgaggtgacgtatttactggcatccagcgactggccgaagatatagttaaaaagcgtcaggcccgtacccaaccctaaggcaatcatcagcttcttaaggttgattttatcgacatacagcagaagcagaacgggcaagaaggtgacgatggttatcgggaagctttcgccgagctgggcaatcttaacgttgaccagcaggtaaatcagcggcagcagcagataactacagattctgatagaacgagacatactcctccagcatctgttgtccactgtaggccttgcggctgcggttgcggaacgattccaggtcggtgccaaaaacggcctgagcgatctgcgccttcggcaattgcaccagcggtagaacctcctgctccgcaaaagttatcccgccggatttttccagcacctcacgtgccgcatcgctgtgggtggcaatcaccggcacgccgatggagagcgcttcacagaggatcagcgggtagttatctacgcgggagctgaacaccagcgcatccatttcattcagcgcgctcatcagcttgcgcttatcggtttcaaacccgtggttgaccacgttagtcccttcaaacggtgaaaatttgccgaaggtgtgaagctcaattttgtcacccagcgccatcatgtcgcgcaccagctgctggttggttttcccgtcgtaacgcaggtcatgcgcaacgatagcgattttcggtttgcccgtggtttgcgccaccggcgtcaggtcggcgagaatggcttccgtcgccacgtcgatgccgttgttaataatctggcagcgccctgccccgtacagactgttgaaggcatcggccacgtgctggctcggggagataaacgtacagccgagcgagagcatgtcgcggaaaagctgacgctttccggccaccagcttgtgcgcgcgatccaccttcaccggcggatagttgctcagcgtcgggcatttctggcagttgtttttccagccttcgcagccgtcggtaaacgcgcaacggccggttacgctccagtgatcgtgcagcgtccagacgaagcgggtgtcgggcttgtgggcctgcaccttctgacaaaacgccaccacctcttccagattcagccagtagctgtggagcacgtgaaaatgcagcacaaccgggccggtagtgcgggtcaccgtgcgataaagcgtattcaggttgccaaacagatcgcggttaaacagacggaacaacgcgatattggcaatcgaggtcaggcgcggcgtgtgcttgtgcacctgcgggaagttatcgtgactgacgcttttcttgccgcccttgccatagccataaataaaacgagactgaagtcctttttgcagcgcgcgctggtgcagatccagcgccacccctgctgctccgccttctgcaaggcgtacgttaaattgcagaatattcatttaatcaccttcacgcgggctttttctcccaccaccagcgcgttatccggaatggtgtccagcaccacgctgcccgcaccaatcgtgacgttgttaccaatcgtaatgtcgccaatgatcaccacgttcgcgcccagctcgacgttattgccaatgaccgggcaggccaggctgtctggcccacggttgccaatggtcaccccatggcggatggtgaaatcatccccggcgaccacgaacttgttgatcaccaccgcatagccgtgatggatggtaaagcgacggccaatggttgcagcggcctgaatttcatagccaaaaaagcattcggtaatgatgcggtacagcaccagcacgggggccgcccagatgttgttcaggacatttttcttacgccacaccgagcaaaaatgcgcgatgcggtacgccagaaccatgcagcaaggacgcaggctccagctgttagcgcggcaatcttccagaaacattatttcccccgaagtccatcagccaggcgctttccgttacgtatggacaacagcgtcagcagcgtgcgccagttcatgcgcttattgcggatctgatagagggtaaagagctgatatttacggctggcacggtcaaacttgtccttgtgcttgcggtaaaaatggaagtagcccgagaacttcttcggcgacgaggtgatctgcatctccccgtggttgatgtgcaggatctgcgtggcctcttccactttccacggctcgccatactccaccaccatccgcaggaagatgtcgtaatcctgcgcggccttcagttcggtatcgaacaggcactccttgaagcgccacgcccaggtgaagacctggttaccaatgatgttgcgcttgtagaacaggcgtcgagagtacggtgatttcggatagagcggcaggctggcaggctgcgagtacacctcgccctgacagacatagtcgttggcatacaggaacgcgtgcgtgaccagctgctctttatgcgacaggaaaatagacaggcggttcggcgtccattcgtcatcgtcgtcgatgccggtcagatactgccctttggcctgcataatcgcctgatttcgtacagcgcaggcgccggagttaatctcgttgtgggtatagaccacccgcgggtcgttgaggtcagtcacgaatttttgcagctgttcatacgaggaagagcagtcatcaacgatgatcagctcccaattatcgtaatcctgacgtaacaccgacttgattgcgcggatcgccagctgctgacgattccatgtcggcatatagattgaaactaaagggcgttgtgtggtcatgatcttcccctgatccctcaccccgcccctctcccctcgggagagggttagggtgagggggattgttatttgctgtcagacttatattcgtactcgtaatacccgtaatcctggtacccggtcgcgcggcggaagatggagttcaggatcacccctttcacctcaatcccgttctgctcgaagcggctcaggctggtttccacctctttcagggtgttcaccgcgtaacgcgccaccatcagggtggtacccgcatggcgacccacaacggcagcgtcggtcacggccagaatcggcggcgtatcgatcagcaccaggtcgtagtttttgctcgcccactccaccagctcggtaaagcgttcgctcatcagcagctcggacgggttaggcggtacctgaccacgtgggatcaggtcaaatttcggcacggtagtcggttttgcgctctggctgatgtcacctttgccaagcaggatctccgacagaccgttgacgttattggtgcccagcagctcgtgggtgttgcccttgcgcatatcgcagtcgatcagcagcacgcgcttgttggtctggctaacgaccgccgccaggttggcgcagacgaaggttttaccgattgacgggctaacaccggtcagcatcaggacgttgtttttagcctgcatcatggcgaagtgcagactggtacgcaggctgcgtatcgcttcaatcgccaggtcggttgggttacccaccgccagcagctggctttgtttgtaacgcttaacgcctttgatggttttcacgctgtcacgggatttttgccactcagacagcggaatgctggcatagacgttgataccgttctcttccagcacctgcgggctttcgataccacggttgaacagcgaacgcagcagcacgccaacgatggagagcatcaggccgagaataatgctgccgagaatgatcagcgctttcttcggcttcagcacgcctggctgggtaatcgccgggtcgacgatgcgcacgtcacccacggtgcttgcctcggtgattttcagctcctgctgcttgttcagcagctgcatgtaaacctgctgtcctgactccacgtcgcgggtcagacgcacgatctcctgctgcgttttcggcatcgcggtcacacggtcattgagcttcgccttctcctcttccagcgtgcggcgtttctccagcagcgtgcggtaagccgggtgacgtttggtgtaaagcttggagatctccgcctctttgaaggtcagttcgttgagctgagcgtcaatgttgaccatcgaatcgaggaccgatttcgcctccagcggcaggtcgacagagtctttatcctggcggtaggcgttcagcttgttctcggcatcatccaggcgggcgcgcacttccgggagctgtttcgacaggaacgccaggcttttcgccgcttcagccgacttacgctcaacgttctgctcaaggtaattgagggtaatgctgttcaggatgtcgcggatctgatccttatcttccccggtaaaggtcatgctcagcacgccggtgtccttaccgttttcggtgacggtcaggttgttttgcaggttgttgatcatccccagcgtggagaatttggtgacggtaaactccccgccctcctgggcgttgatcgcactgaccatcatgctgacgccgtctttgctcagcatctgtccgacttcaccgcgcgcgctaaagcccgcgtcgctggtcaactgatactgtttcgggccaagcaccgtcagggtaaaggtctgatcggctgccccttttggcagcacgaagtcagtgaccttcaccgtgtcgttgcttctgcccatcagccgatcccagcccgcaccaaagattgggaaggtatttttggtgacggagatatcgagcccaaggtcgtgaaccgttttacccagcaccagacgtgactggatgagctggatttcagcgtcagaggccggcggcttgttcgccagcgcagagccaatgtcctgcaccagcgagttaccggtattctgctcgatctgcaccagcgcatcggcgctgtagataggggtggcgaacagcgtatagacgacggccgccgcggcaaacacggcggtaatgcccagcacccaccactttgcctcgataaccgtgccaaccaggcgcccaatatcaatttcatcactgcccgaagtcggggcggcagaaggttttgttttttctgtcattgttatccctgctgagctttcagtgcctgcgcccactgttgggcagactggtcaagtaaggtgtaaaccgcctcgaaagcctcatggcttttgcgatatggatcgggaatttcacgctcattgtcccagtgtccaaacagcatcaccttaccgcgcatctccggagcgatatcgcacagcgcttgaatatggcgtttttccatcgccagaatcaggtcatactcacggcacatgcggccagtgacctggcgggcaacatgcccgtcgagagagaggtgatggtcccgcgccacgctcattgcgcgctcatcggcacctttaccgaccagtgcacccagccctgccgaatcaacggtcagttcgggctggtagtgtttcaacaaccgttcagccgtaggggaacggcaaatgttccccacgcataccaccagaattttgttaaacatcgcggattaccaggtatgaatgtcgcgcgccgtatccgtcatgtagcgaacgccactgatggttggcagcaactggttgatcagacggttccagcgggcaaccggtgcggtagtgacatacaccacgtcgtatggctggagacggaactccgtcgccatcaccagagaggtcgcatcggacatatccagctggtagatgttggcaatcttgcctttcgcgctgccctcacctttcagcggacggatcacgaagataccggtcgcgttagaggtcgtcagatcgataccctcagcattgcccagcgcttcggtcagcgtcataccgctgaagtccatcttgagggtgctctgtttcttcacttcacccatcacgaagactttgagatcgtcattgcgtggtacatagaggatgtcgcccggataaagcaggcggttctgggtcagatcgccgttttgcatcagcgcctgcagcgaaatgcgctgctctttcccgttgtgggtcagtaccacgttgcgccagtcggcgccgtcggttaacccgcctgcggcgttaatggcgtccagcacggtcagaggaacgttggtgatggcctgctgaccagatttgttcacctggccggagatataggctttttgcgagcggaatgcggcgatattaacgtccacctgcggatcggcgatgtactgcgctaagcggccggtaatatcactgcggatctcggcaagcgttttccctgctacatggactttaccaatgtagggatagaacatggtgccatctgactgcacccagttaccggtgtcgcttgagctgcggtactggcccgctggcgtggtcagttcggggtgatcccagacggtcacgttaatgacgtctccaggccctacgcgatactggtaggaagcaatttcctggtccagtgacatatttggctgggcaacgtttggacgtgggcgtaattgttcgaccagacgaggcgtaagtggataaacattcaccattttgtcgagatcaaaatcggcatcctgttgcttgatcacatccttgcccattgtagacatattgcttccgggaaagaccgtgcaaccgctcatcaaggtcacagacaccaataatggcatcaatttcattttggagttcatcattgattatttatcactttggcagagtaattatcctgtgcaatttaaatacgtgtgaatctaaaatgcattaagaatgtagctaattaaataaaaatataagtggcatcattcctaaaaaaaacgctatttggccagtcactgttgacaacgtaatcatggcccacccacacacattcaggcacgctaccgcccttggcttccagctaccaatacgctataacacaatgaattacaggcaaaaaaccgcaagaattttttgctggtgaaataaatgaagcattcaaaatacgcaggcactatttcgttaatcgcccaaaaaaaacatcaatccttaacgggagatatccttttttaggctaataatcttgtaacagttaatcccaaaacaggcaagaaaacgggttccgaacgtcaaattttaagaatttatttagaaatgcactttatttttaagaatttctttatgttgacagcgttatgattgaccatcttttaatgcgatatttcttaattttgttatttcggataaatacagattttctggataaattaaaactattatacccgccagttttaatttaatgattattgagagaaatctcatactgacattgcattttcccacacctttatccatgatcgaattgtgtcattagtcatattacagaaggtattgctactactatggaatggattgccgatccctcaatctgggccgggctggttacgctggttgtcatcgagctggtgctcgggattgataatctggtttttatcgccatcctcgctgaaaaactgcccccttcccagcgcgatcgcgcgcgcgtaacggggctgctgctggcgatggtgatgcgcttactgctgctggcctctatttcctggctggtcacgctcactcagcctctgttctccattcacggtctgagctttagcgcccgcgatctgatcatgctcttcggcgggctattcctgctgttcaaagctaccgtggagctcaacgagcggctggaaggcaaagacagcgagaacccgacccagcgccgcggagcaaaattctggccggtggtcgcgcaaatcgtggtgctggatgcggttttctccctggactcggtgatcaccgccgtcgggatggtggaccaccttgcggtgatgatggccgcggtcattattgccatcacgctgatggtcatggccagcaaggcactgacccgcttcgtgaacagtcacccgaccatcgttatcctttgcctgagcttcctgctgatgattggcttcagcctggtggccgacggttttggcttccatattccgaaaggctacctgtatgccgccatcgggttctccgtcatgattgaagcgcttaaccagctggcgatattcaaccgccgtcgcttcctttccgccaatcagactctgcgtcagcgcacagccgacacggtcatgcgtctgttaagcggcaagaaagaggatgcggagctggacgccgaatcctccgccatgctggccgaccacagcgacgggcagatctttgacccgcaggaacgacggatgattgagcgagtgctcaatctgaaccagcgtacggtcagcagcattatgacgtcgcggcatgacattgagcatattgacctgacggccccggaagcgcacattcgcgccctgctggataaaaaccagcacacccgcgtggtggtgaccggcggggaagcggaagaggagctattgggcgtggtacacgtcattgatctgctccagcagcagctccacggtgagccgctcaatctccgcgctctggttcgccagccgctggtcttcccggaggggctgccgttgctttccgcccttgagcaattccgtaacgcgcgcacccactttgcctttgtggtggatgagtttggttcggtggaagggctggtcacgctcagcgacgtgatggaaaccattgccggtaatctgccaaacgaggtggatgagattgacgcccgccacgacattcagaaaaacgccgacggctcgtggacggctaacggccatatgccgctggaagacctggtgcagtatgtgccgctgccgctggatgataaacgggaataccacaccattgccggtctgctgatggagtatttgcagcgtatcccacagccgggggaagaggttcaggtcggcgactatcggcttaaaacgctccagattgaaaaccatcgcgtgcagaaggttcagctgataccgctgcgggaagaggaagaactggattttgaggtgtaaaaaagccgggtggcgcaacggcgtcaggcttttgtaggccgggtaaggcgaagccgccccccggcgcaacaggcatcaaagcttatccagcagcttcttcacatccttgccgtcctgtgaatctttattacgatccgcccagccgctgagtcgacgtttcgcttcatcctgcagatgcttacgcaggatctgatccacttgcagactgtaattcagggcctgccatttgccgtatacggtcagcgggaccggcgtctgtttcaggaagtcgatgagcttgctttccccctgccagccggaaagtacccgcacgttaaagcgcgtgtccgccgtctctttgaccagatccagcttaccctcgcccgttactgataagagtgaagaggtaccctgcattccgtcgagagagagttgtccgttgttcagcgtcaggtccgtggtgaagctgtcgaggcgcgtggcactgtcgtagttctcctgggccttcacatcgctgctgcgctcaaccgcctgctgcaccagttgctggaagttaagcccttccatacgggagtttttcagatcaagatgcgcctgcccctgccactcgcggcggaatgcatcggcatcaattttcgtgccggagaaatcccccgcgagcgtcaactgccccgtcagagagatcgggtagttaaacgcggtcaggatggtccctatctcaacgttatcgagacgcggctggaattcggcgctggcaacgtctttacggacatccagcgtgccgggcagtgagaggtgtcctgcgcccatcttgccgctcagttcggagatcaccagcaaaccgttatggttaaacatctggctgctgacgtcggtaaagtccatgccgcgccagcgcaggctggtggctttcagcagaatatccgccgtgaatccgcgcagagcgttatagtcaggttgatcgagattcgacgaaataaccggacgtgataccggtgcctggctttgccccgtctgcgtcgcctcgctgtccgtggcgctggctggcagaggtggcaacaggttttccaggttgagtttgtcaaattgcagattcagcacccacttcggcttctcttcaaaggtgacgctcgcctgccccttcaggctactgtcgtttgcctgcaggttgagattatccagctccagctgtttttgttcctcacgccacacggcctgcagcgtcccctgaccggcgatcccctgggtgggcagattggcccccgtcagctgccagttgagctgctggatgttcgccgtgagctgatgcggatagtctgacgcattcactttagcattcaacgacagcgtcaaatcccgctgatcgcggttcacgcgcccgctgaattccacagatgcaagatggtgctcatcctgttccatctgcagattaatgttgcgaacggtgaccagctcttcgtgctcatgctggaaaaccagcacgctatcggccactttcagtttgccaatatcaaaggaccagccagtatcagacggttcatcaggcagggtattttcacgcggtgccaccggcgcgttggcatcacggacagcttcagtttgcggggttagctgaatcaccgcgcctttcagcatcacctgattcacctgcagctgatgggaaatgagcgggatcagtgccacatcaaggcgcatgttgtctgcggacaccagcggctgggacgcccccggcgccgtgagcgacatgcggccagagagaatgctgagctgcggccagacgtgccagcgcagcggcccgtccagcttcagttgataaccactgcgtgcctcaacctgccgcaccatatacgcgcggaagtcgttagggttaaccagcagaaccaacgccgaaaggccagccaccagcaccaccagcaaaatcatcagcgttgtcagaactcttctcatggcatcctcaatggactaacgatcagtctttatcaatacggctggcaaccgcaccctgctggtcgcgatattttgcgtcctgacggcggttatacggcctgtctgccgggcctgacagcggttcaaaacttaacgcgccgatcatcatccccggacgaagcgccagcggcaatttaccggcattgaagaattccagcacaatacggcccgaccagcctggatcgatacggtgcgcggtcacgtgtaccatcagtcccagtcgcgccagcgaagaacggccgtcaagccagccgacgaggtccgcaggcagggtgacggattcaaacgttaccgccagcgccagttcacccggatgcagataaaaggcttcgccatcttcgattacgatttcgtcactcatcacgcgatcgagcgcggcgctgacttcgtccttcggtccgctgaggtcaatgaacggtgcggtatggccgctaaaggtgcggaatttattccccaaccggacatcgacggtcaccccattgatacgctcaacaggtggacgtggggtaatagacaaacggccttcatccagccaggcttcaatatcgcgatcacaaagacgcatgcctttttctcctttcatgcatcgtaccctgagccggtaagcgctcagggtaaaaccaggttatctctgaacggtacacaattcacgcggcttattcaaaaaactggctgattttcgcttttaagatatcgatcgcgatgcggtttttacccccgcgcggcacgatgatatcggcgtattgtttggagggctcaataaactgcaggaacatcgggcggaccgttttctggtactgcgccatcacggagtccattgagcggccacgttcattaacgtcacgcttgatgcggcgcatcaggcaaatatccagcggggtatcgacgaaaatcgagaagttcatggattcacgcaggcgggcgtcggtcagcagcaggatgccttcaaggataatgacctttttcggctcgatgcggatcgtttcctgggtgcgggtatgttctacgtaactgtaaacgggcagttcgatcgcctggccgctcttaagcgcttctaaatgctggaacagcaggctgtgatccatcgcatttgggtggtcatagttcgttttaacgcgctcttccatcgacagatgggattgatctttgtaatagctgtcttcgggaatgacgccgatatgctcatcacctacttgttcacgcagttcgcgataaagcgtactggcaattagacttttacctgaagccgatgcgccggcgatgcctataatgacgcactgatgagacttatcagtcataaatttagcgacctgattaacctggatgtaaaggaaggacgacgccggagcgtcaaacgcggcaattatagggatttcgcgggcgtgataccagtcgaatactcaggttctgcgaaactgaccgaaaagtgacgagttattccctgaatgaaatttaaatgcgcattttttcgccgcttacccgttttttttcacggagtaagtatttaataagtctgtgttgtcaaattctgagcggtcaccatatgaattgtaaattgtttgtactagcataaaccaaattatcaaattcacgcgttcggacatcttcttccctgacggcatggcgtctctggataaagcggtaatgaataaacaataccagcgggttttggtgaccaccccacatcctttattacgacttgtctgtctgggcctggtcacctttatctttaccttattttcgctggagctcacccgcttcggcaccctgctggccccgctctggtttcccaccgccattatgatggtggcgttttaccgccatgccggaaaaatgtggccgggcattgccctggcctgttcgttcggcaatattctggcctcatggatgctgttctcctggggttcggtcagcctcatctaccctgcggtcaacgtcattgaggccgttatcggcgcgctgttcctgcgtaaatggctcccgtggtacaacccgctgcagaatctgaatgactggatccgcgtggccatcggcagcgcgctggtgccgccactgatgggcggcattctggtgtctctgctggcacccggctctgagcccctgcgtaatttcttcgtctgggtgttgtcagaagccattggcgcactggcactggtgccactggggctgttatttaagccgcattatctgctgcgccaccgtgacccgcgattgctgctggaaacgctgaccacgctggccgtgacgttagccctcagttgggcagccatcacctggctgccgtggcccttcacctgcgtgatcgttctgctgatgtggagcgccgtgcgcctgccgcggatggaagcgttcatggtgtttctggtcaccgtgatggtggtgtcgctgatgattgcccgcaatcctctggcgctgaccacccagcacgccgggccgatgctgaacgccccctggctgccgttcctgatgctgctcctgcccgctaacgtgatgaccatggtgatgtacgccttccgtgccgaacgcaaacacatcaccgaaagcgaagagcgctttcgtaacgcgatggaatattccgccatcggaatggcgctggtgagcattgaaggcaaatggcttcaggctaacaaggcgctgtgcaatttcctcggctacagccagacggagcttcagtcgctgaccttccagcagctcacctggccagaagatctgaataccgacctcgagcagctcgaacagctggtcaacggcgagatcaatacctactccctcgaaaagcgctattacacccgcgacggggaagtggtctgggcgctgcttgccgtctccgtggtgcgtcatgccgacggctcgccgctctattttattgcccagattgaagacattaacgatctgaagcagaccgaatgggtcaataagcgcctgatggagcgcattacgctggctaacgaagccgggggcatcggcatctgggagtgggatctggaacccgacattatcagctgggataagcggatgtttgagctctatgaaataccgccgcacatcaagcccacctggcagctctggcacgacacgatgctgccggaggatcgcgtccacgctgagcaggtgctgcgggactccctgatttcccgcctgccgtttaagctggaattccgcatccgcgtgaaggaaggcgtgcgtcatattcgctccctggcgaaccgggtgctcaataagcagggggaagttgaacggctgctcggcatcaacatggacatgaccgaggttaagcagcttaacgaggccctcttccaggaaaaagagcgcctgcacattaccctcgactccatcggtgaagcggtgctgtgcaccgatatcaacatgaacgtcacctttatgaacccggtcgcggagaaaatgagcggctggctgcagaccgaggctatcggccagccgatcctgaaggtgttacacattaccttcggtgaaaaaggaccgctgatggagaatattcacagcggcgatatgtcccgttccgatatcgatcaggatgtggtgctgaactgccgtactggcggcaattatgatatccactacagcattacgccgctcagcacgctggatggacagaatattggctcggtgatcgtcattcaggacgtcaccgagtcgcgcaaaatgctgcgccagctgagctacagcgcctcccacgatgccctgacccatctggcaaaccgggtcagcttcgaaaaccatctcaaacggctcttgcagaccgttcgcgaaacgcgccagcgccatgccctggtgtttatcgacctcgatcgcttcaaagccgtcaacgacacggctggccacgccgcgggtgatgccctgctgcgggaactggcttccctgatgttgaccatgctccgctccagcgacgtgctggcgcgtctgggcggggacgagttcgggttactgttaccggactgcaacctggaaagcgcgcgctatatcgccggtcgcctgattcatgccatcaacgactatcactttatgtgggaaggccgcctgcaccggatcggcgccagcgccggcatcacgctgattgatgaaaataaccatcaggcgtcggaaatcatgtcgcaggcggacattgcctgttacgcctcaaaaaacagcgggcgcggcatggtgacggtgtacgaaccccagcaggagcgggatcaccacacgcgcagcatgatgtcgcttgatgaacagtggcacatgattaaagacaatcatctgatgatgattgcccgcagcgtcgcctccccgcgcatcccggagagcagtaatttctggctgctgtcgttacgcctgtggaccagtcagggcgaagttcaggaagagcatgccttccgctcgggtctggcggagcctgagcttctgcacgccctcgacagacggatctttagcgagtttttccgcacctatgccacccagatcgccagtaaaggcatgggcgtggcgctgccgctctcggaggccggtttagccagcgtgacgctggtcgatgaactgctcgacctgctggataaaagcccgatgccgggccgtctgctgcatctggttatctctgccgatgtggtgtgcaacccggataagaacctgcatcgcggtctgcaaaagcttcgccaggcgggctgccgcgtgatcttcagccaggtgggacgcgacatgaacgtctttacccacctgaccgcgaatatggccgactatctgatgctggatgcagaggtggtaaccaacgtgtatggcaatctgatggatgagatgatggtgaccattgttcagggccacgcccagcgtgtgggaatgaaaactatcgcgggcccctgtaaccagcccatcatgatggatacgctctccggcatcggcatcgattttatctttggtgacaccatcgccgagccgcagccattagatcttctgctcaacaccagctatttcgccatcaactgacggtgcccagccgtcggtataccagatgtgcagcagcgcgtaggagcgccacggcttccagcgttcggcataacgacgaatttgcgcgggcgtcattccggcgaagcgctgtttaatcaggtaatcatccggcagaaacacatctttcgcctgccagccgcgcagggccagataatttgccgtccagcgccctatccccggccgctgctgtaacgccttcatcccctcttctgtattcgcgggcggggaaagcggaaacgttccgtcaataaccgactgcgccagatgaatcagcgactccgcgcgctttagcggcatacccaacgccttcagcgccagcgggtccgctgccgccagcgcctggggcgtggggaagcagagatagcccggacaatccgccaccggttcgccacagagcgccaccacgcgtgacgccagcttcgccgccatcgccacgctcaccagctgcccgaggatcgcccggacgccctgctcgtacgcatccatcgcccccggtaaacgcaagcctggccttgcagcaccgagttcgcccagcgtttctgctatttgctgcgggttacagcggagatcgaacaggcgttcgatgcgttcaagacacgcctgcgcaaccggaattaaccccgggctgagggtcacggtcagcgtatgtgttgcgagatccggcgtcacgcggaaaatcccctgatgcccctcgcaggcaaaactgcgctcatagtaatcgttggtgacggtttcaatgcccgttaccgcgcgcgcgccaagaaaaccaaacatccactgccagtcataagggggaagccaggtgagggtatacatcgttgctccttttttagtgttatcagcataaacgtaaagaccctgttttgccttgctttcatattcctgttgtcgccatgcagacatttcgttaaagtctcgccccttctcaccggcatggggattcatcgtgtttattggatttgactacggtacggcaaactgctcggttgcgattatgcaagacgggcagccacggctcctgaaaatggaaaaagagagcacgctgctgccgtctatgctctgcgcaccgacgcgtgaagcggtgagcgagtggctgtttcgccaccatcaggttccggccacggcggcggagacccaggcgctgctgcgccgggcggtcagctttaaccgcgaggaggacatcgacgttacgccctccagcgtgcagttcggcctcgcctcgctcgggcactacattgaagaccccgaagaggtctacttcgttaagtcgccaaaatccttcctcggcgccagcggcctgaagccgcagcaggtcgcgctgttcgaagatctggtgtgtgcgatgatgctgcacatccgcaaccaggcgcagacgcaggtctccgatgcgattacccaggcggtgattggccgcccgatcaacttccaggggctgggcggcgacgaggccaaccagcaggcgcaggggatcctggagcgcgcggcgcaccgcgcaggcttccgcgacgtggtattccagtatgagccggttgccgcagggctggacttcgaagccacgctgacggaagagaagcgcgtactggtcgtggacatcggcgggggcacgacggactgctcgctgctgctgatggggccgcagtggcatcgccgtcgcgatcgtgaaaacagcctgctcgggcacagcggctgccgcgtgggcggtaacgatctggatatcgccctggccttcaagagcctgatgccgctgctcggcatgggggggcaaaccgaaaaaggcatcgccctgccgatcctgccgtggtggaacgcgatagccatcaacgacgtgcctgcgcagagtgatttttacagcaccgccaacggccgcttccttaacgatctggtgcgcgatgcccaggacggcgaaaaggtcgccctgctctataaagtgtggcgtcagcgtctgagctaccgcgtggtgcgtacggcggaagagagcaaaatcgccctgtccgaccgcgctgaacatgcggtctccctgccgtttatcagtgacgaactggccaccgccatttcgcaggacgggctggagacggcgcttgcccagccgctgcagcgcattctggaacaggtgcagctcgcgctggagaacggcaaagagaagccggacgtcatctacctgaccggcggtagcgcccgttcaccgctgattaagaaagcgctggccgaacagctgccgggcattccagttgcgggtggcgatgactttggttccgttaccgctggtctggcgcgctgggcgcaggtgatgtttagctagtgcggttgtgccgggtggcggcttcgccttacccggcctacaaaacgtgtgttgttgtagtgcggtctggtgccctctcccacaaaacaccaaaaacggcaacatccgttgccgttcgcatttaccttgtaggccgggtaagcgaagcgtcacccggcaacactcagacaattcccgacagttttccatatttcctccatttttccgctgtgttgcctgactaaactagtatcattccccgaagtattcaggatgagaacgtataacgatgaaaggcagtaacaaatcccgctgggcaatcgccgctggcatcattgtggtggcccttgccgccgcctggtactggcacagtcaatccgcgaacaccgccgcaccggccggcaccaccagccagacccagcgcccaacgggtggaggtcgtcacggcatgcgcggtggcgcgctggcgccggttcaggcggcgacggcggtgaatagagccgttcctcgctatctcaccggtctcgggaccattaccgctgccaacaccgccacggtgcgcagccgcgtcgacggccagctcatcgcgatccacttccaggaaggtcagcaggtcaaagcgggcgatctgctggcggaaatcgacccgagccagtttaaggtcgcccttgcccaggcgcagggacagctcgcgaaagacaacgcgaccctcgccaacgcccggcgcgatttagcccgctaccagcagctggtgaaaacaaacctggtgtcccgtcaggatctggatacccagcagtcgctggtcagtgaaacgcagggcacgatcaaagcggacgaagccgcggtggccagcgcccagctgcagctggactggagccgcatcaccgcgccgattgacggacgcgtcggcctgaagcaggtcgatatcggcaaccaaatctccagcggcgacaccacgggcatcgtggtgatcacccagacccacccgattgatttagtctttaccctgccggaaagcgatatcgcgaccgtcatgcaggcgcaaaaagccggtaaaggcctggtggtggaagcctgggaccgcaccaacaagcagaagctgagtgaagggtctctgctcagtctggataaccagatcgacaccaccaccggcaccatcaagctgaaggcgcgctttaataaccaggacgatgccctcttcccgaaccagttcgtcaatgcgcgcatgctggtggcgaccgaagagaacgcggtcgtgatccccaccgctgcgctgcagatgggtaacgaaggcaactttgtctgggtgcttaacagcgacaataaggtcagcaagcacctggtgaaaaccggtatccaggacagccagacggtggtcatcagcgccgggctttccgcaggcgaccgcgtggtcaccgacggcattgaccgtctgaccgaaggggccaaagtggaagtggtggaaccggcgaaacagggagcgacctcctgatgcaggtgctgccgccgggctccacaggtgggccgtcacgcctgtttatcctccgtcctgtcgccaccacgctgctgatggtggcgatcctgctcgccgggattatcggctatcgcttcctgccggtctcggcgctgccggaggtggactatcccaccattcaggtggtgacgctctatcccggcgccagcccggatgtcgtgacgtccgccatcaccgccccgctggagcgccagttcggccagatgtcagggctaaaacagatgtcatcccagagttccggtggggcgtccgtcgtgacgctgcagttccagctgacgctgtcgctggacgtcgccgagcaggaggtgcaggccgccatcaacgccgccaccaacctgctgccgtcagacctgcctaacccgccggtctacagcaaggtgaacccggcggatccgccgatcatgacgctggccgtcacctcctccgccatgccgatgacccaggtcgaagacatggtcgaaacgcgcgtggcgcagaaaatttctcaggtctccggcgtcggcctcgtcaccctggcgggcggacagcgcccggcggtgcgcgtcaagcttaacgcgcaggccatcgccgcgctggggctcaccagcgaaaccatccgcagcgccatcagcaatgccaacgtcaactcggcgaagggctcgctggacggcccaacccgcgccgtcacgctctcggcgaacgaccagatgcagtccgccgacgaatatcgtcagctgattatcgcctaccagaacggcgcgccggtgcgtctgggcgacgtggcaaccgtagaacaaggcgcggagaacagctggctgggagcctgggccaacaagcagcaggcgatcgtgatgaacgtgcagcgccagccgggcgcaaacatcatcgaaaccgccgacagcatccgcaccatgctgccgcagctgatcgaaagcctgccgaagtcggtcagcgtgaaggtgctttcagaccgtaccaccaacattcgcgcgtcggtcaccgacacccagtttgagctgatgctggcgattgcgctggtggtgatgatcatttatctgttcctgcgcaacgttccggcgaccattattcccgccgtcgccgtaccgctctcgctggtcggcacctttgcggtgatggtgttcctcgatttttcgatcaacaacctgacgctgatggcgctcaccatcgccaccgggttcgtggtggatgatgccatcgtcgtcatcgagaacatctcgcgctatatcgagaaaggtgagaaaccgctggccgccgcgctgaaaggcgcaggtgaaatcggctttaccattatctcgctgaccttctcgctgattgcggtgctgatcccgctgctgtttatgggcgatattgtcgggcggctgttccgcgaatttgccgtgacgctggcggttgccattctgatctccgccgtggtgtcgctgaccctgacgccgatgatgtgcgcccgcatgctgagccatgagtccctgcgcaagcaaaaccgcttctcgcgcgcctccgagcgcatgttcgagcgcattattgccgcctacggtcgcgtgctggcgaaagtcctcaaccacccgtgggccacgctcggcgtggcgctcggcacgctggcgctcagcgtgatgctgtggattttcattccgaaaggcttcttccccatccaggacaacggcattattcagggcacgcttcaggccccacagtcggtctcttttgccaatatggcgcagcgccagcagcaggtatctgacatcatcatgaaggatccggcggtagagagcctgaccgcttacgtcggcgtggacggcaccaatccgtcgctcaacagcgcgcgtctgcagatcaacctcaagccgctggatgagcgtgacgatcgcgtcaacgccgtcattgagcggctgcaaaacgccgtcgcccgcgtgccgggcgttgagctttacctgcagccgattcaggatttgaccatcgatacccaggtcagccgcacgcagtaccagttcacgctgcaggccacctcgctggacgcgctcagcacctgggtgccgcagctggtggataaactcaaaaccctgccgcagctcgccgacgtcagcagcgactggcaggacaaagggctggccgcgtatgtgaacgtcaaccgcgacgccgccagccgtctgggcatcaccatggcggacgtggataacgccctgtacaacgccttcggtcagcgtctgatctccaccatctacacccatgcgaaccagtatcgcgtggtgctggagcacaacaccgacaacacgcccggcctggcggggctggactcggtgcgcctgaccagcaaagacggcggcattgtgccgctgagcgctatcgccacggtggaagaacgctataccccgctgtcgattaaccatctggatcagttcccgtccaccaccatctcctttaacgtgccggacaactattctctgggcgaagcggtggaggccattcaggcggctgagaaagatctcagcttcccgtccgacattcagacccagttccagggcagcaccctggcgttccaggccgcgttgggtaacaccatctggctgatcgtggcggcggtcgtggcgatgtacatcgtgctcggcgtgctgtacgaaagctttatccacccgatcaccatcctctctaccctgccgacggcgggcgtgggggcactgctggcattaatgctggcgggcagcgagctggacgtgattgccaccatcggtatcatcctgctcatcgggatcgtgaagaaaaacgccatcatgatgatcgacttcgccctggccgccgagcgcgagcagggcatgtcgccgcgcgacgcgattttccaggcctgcctgctgcgttttcgccccatcctgatgaccacgctggccgccctgctgggcgcgctgccgctgatgctcagcacgggcgtcggcgcggagctgcgccgtccgctgggtatcggcatggtcggcggtctgctggtgagccaggtgctgacgctgttcaccacaccggtgatctacctgctgtttgaccgcctggcgctgtggacccaaagccgcttcccgaaacgtgaagaggaggcataagtgaagtttttcgccctcttcatttatcgcccggtggcgacgattttaatctcgctcgccattaccctctgcggcgttctgggcttccggctgctgccggtggcgccgctgccgcaggtggattttccggtgatcatggtcagcgcctcgctgccgggcgcctcgccggaaaccatggcctcttccgttgccacgccgctggagcgttcgctcgggcggattgcgggggtcaacgagatgacctccagcagctcgctgggcagcacgcgcattattctggaattcagcttcgaccgggatatcaacggcgcggcgcgcgacgtgcaggcggccattaacgccgcacagagcctgctgccgagcgggatgccgagccgcccaacctaccgcaaggccaacccgtccgatgcgccgatcatgatcctgacgctgacctcggatacgtactcgcaggggcagctgtacgactttgcgtccacccagctggcgcagaccatctcacaaattaacggcgtcggggacgtgagcgtcggcgggagttccctgcccgcggtgcgcgtggggttaaacccgcaggcgctgtttaaccagggcgtgtcgctggacgacgtgcgctccgccatcagcaacgccaacgtgcgcaaaccgcagggggcgattgaggacaacagccaccgctggcagatccacaccaacgacgagctgaaaaccgcggcggaatatcagccgctcattattcactataacaacggcgcggcggtgcgcttaagcgacgtggccagcgtcaccgactcggtgcaggacgtacgcaacgccgggatgaccaacgccaagccggcgattctgctgatgatccgcaagctgccggaagcgaacattatcgagacagtgaacagcattcgcgcccgtctcccggagctgcaggagaccatcccggcagcaatcgatctgcaaattgctcaggatcgctccccgaccattcgcgcctcgctggaagaggtcgagcaaacgctggtgatctccgtcgcgctggtgatcctggtggtcttcctgttcctgcgctccggccgcgcgacgctgatcccggcggtggccgtgccggtgtctctgattggtacctttgccgccatgtacctgtgcgggtttagcctcaacaacctgtcgctgatggccctgacgattgccaccggcttcgtggtggatgacgccatcgtggtgctggaaaacatttcccgccatctggaagcgggcgtgaaaccgctgcaggccgcgctgcagggcacgcgcgaggtgggctttacggtactctccatgagcctgtcgctggtggcggtctttctgccgctgctgctgatgggcgggctgccgggcaggctgctgcgcgaatttgccgtcacgctgtcggttgccattggcatttcgctggtcatctccttaacgctgacgccgatgatgtgcggctggatgctcaagcgcagcaagccgcactcgcagccgcgccgcaaaggctttggccgcgtgctgatggcgatgcaggaaggctacggcaaatcgctgaagtgggtgctgaaccacacaaggctggtcggcctggtgctgatcggcaccatcgtgctcaacgtgtggctgtatatttccatcccgaaaacctttttcccggagcaggataccggcgtgctgatgggcggcattcaggcggaccagagcatttccttccaggcgatgcgcggcaagctgcaggactttatgaagatcattcgtgaagacaaagccgtggataacgttaccggctttaccggcgggtcgcgcgtcaacagcgggatgatgtttattaccctgaaaccgcgcggcgagcgcaacgaaaccgcccagcaggtgattgaccgcctgcgggtgaagctcgccaaagagccgggggcaaacctttttttgatggccgttcaggatatccgcgtcggcgggcgacaggcgaacgccagctatcagtacacgttactctcggacgacttagccgccctgcgcgagtgggagccgaagatccgcaaggcgctggccgccctgccccaactggcggacgtaaactccgatcagcaggacaacggtgccgagatggccctgacctacgaccgtgaaaccatgtcgcggctgggcattaacgttgaagccgccaacagcctgctgaacaacgccttcggccagcgcgagatctccaccatctaccagccgatgaaccagtacaaggtggtgatggaggttgatccgcgctacacccaggacatcagcgccctggataaaatgtttgtcatcaacaacgacggtaaggcgattccgctctcctacttcgcaagctggcagcctgccaacgcgccgctgtcggtgaaccaccaggggctgtcggcggcgtcgaccatctcctttaacctgcccgccggttcgtcactttccgaggccagcgacgcaatcaaccgcgcgatgacgcagcttggcgtaccgtccaccgtgcgcggcagcttcgccgggaccgcgcaggtattccaggagacgatgaactcgcaggtgattttaattctggccgccatcgctacggtctatattgtgctgggcgtgctgtatgaaagctacgtgcacccgctgaccatcctttcgacgctgccgtcagcgggcgtgggtgcactgctggccctggagctgttcggcgcgccgttcagccttatcgcgctcatcgggatcatgctgctgatcggcatcgtgaagaaaaacgccatcatgatggtggacttcgcgctggacgcccagcgcaacggcaacctctcgccggaagaggccatcttccaggcctgcctgctgcgcttccgtccgatcatgatgaccaccctggcggcgctgtttggcgcgctgccgctggtgatctcgggcggcgacggctcagagctgcgccagccgctggggatcaccattgtcgggggcctggtgatgagccagctgctgacgctgtacaccacgccggtggtctatctgttcttcgaccgcctgcggctgcgcttttcgcgtaaaaacagaactacggtgaccggataaatgacagagcttcccagcaacgttcgctggcaattatggatagtcgccttcggcttctttatgcagtcgctggatacgaccatcgtcaacaccgccctcccctcgatggcgaaaagcctcggggagagcccgctgcatatgcacatggtgattgtctcctacgtgctgacggttgccgtgatgctgcccgccagcggctggctggccgataaggtcggcgtgcggaatatcttcttcaccgccatcgtgctgtttaccaccggctcgctgttttgcgcgcaggccaacaccctcgaccagctggtcatggcgcgggtgctgcagggcatcggcggggcgatgatggtgcccgtcgggcgactaacggtgatgaagattgtgccgcgcgagcagtacatggcggcgatgacctttgtcaccctgcccggccaggtggggccgctgcttgggcctgcgctgggcggtatgttggtggagtacgcctcctggcactggatcttcttaattaatcttcctgctggcatcatcggcgccatcgccaccctgacgctgatgccgaactacaaaatgcagacccggcgctttgatttcttcggctttattctgctggcggcgggcatggccacgcttaccctggcactcgacgggcaaaaggggctggggatttcgaccctgatgctcgggttgctggtggttatcggcatttccaccattgcagggtatttgtggcatgctcgcggcaatgaccaggcgctgttcagcctgaacttgtttaaaaaccctacctaccgtctcgggctgttcggcagctttgccggacgcgtcggcagcggcatgctgccgtttatgacgcccgtttttctgcaaattggcatgggcttttcgccattccacgcgggcctgatgatgatcccaatggtgctcggcagcatggggatgaagcgtatggtggtgcaggtggtgaaccgctttggctaccgtcacgtgctggtgaccgccacgctggggctggcgctggtcagcctgctgtttatggccgtggcgctgatgggctggtactacgtcctgccgctggtgctgttctgccaggggatcatcaactccatgcgcttctcgtcgatgaataccctgacgctgaaggacctgccggacgatctggcgagcagcggcaacagcctgctgtcgatgattatgcagctctccatgagcgtgggcgtgacgatcgcggggttgctgctcggcatgtacggccagcaccatctcagcgtcgacacgccggtggcgcatcaggtctttatgtatacctacctcagcatggcggtcatcatcgccctgcccgcgttcatcttcgcccgcgtgccggatgataccagcaagaacgtcgtgattaggcgcggcaaaaggagtggctcatgaaattctggcgtccgggtattaccggcaagctctttctggcgatttttgccacctgtatcgttttgctgatcaccatgcactgggcggtgcgggtcagctttgagcgcggctttattgattacatcaagcatggcaatgagcagcgtttgcagggcttaagcgatgcgctgagtgaacagtacgcccagcacggcaactggcgttttctgcgcaataacgaccgctttattttccagattctgcgctcgctggagcacgataccggtgacgaccgtccgggcccgggcatgccgccgcacggctggcgcacccagttctgggtgatcgaccaggacatgcgccccctggttggcccgcgcgcgccgataccgccggacggcacccgtcgggcgattaaagtgaataacgctaccgtcggctgggttatcgcctcgccggtggagcgcctgacgcgcaacaccgacatcaactttgaccgccagcagcgccggaccagctggctgattgtcgccctctccacgctgctcgccgcgctcgccaccttcccgctggcgcgcggtctgctcgccccggtgaaacggctggtggagggcacgcacaaactcgccgccggggatttcaccacccgcgtcgatacccgcagccaggacgaactgggcaagctggcgcaggactttaaccagctcgccagcacgcttgaaaaaaaccagcagatgcgccgcgattttatggccgatatttcacacgagctgcgcaccccgctggcggttctgcgcggcgagctcgaagccattcaggacggcgtgcgccagtttacgccggaatcggtggcctctctgcaggcggaggtgggcacgctcaccaagctggtggacgatctccaccagctctccatgtccgatgaaggcgcgctggcctaccagaaggcgcccgtagacgtcattaacgtgctggaagtggcgagcggcgccttccgcgaacgctttgccagccgcaacctgaaaatcgacctctccctgccggacagcgcggtggtgtttggcgacaaagatcggctgatgcagctgttcaacaacctgctggaaaacagcctgcgctacaccgacagcggcggcgggctgcatatctccggcaggcaggacaacgggcgctttgccctcaccttcgcggattccgcccccggcgtgcaggacgcgcagctggaaaaactgttcgagcgcttttaccgcaccgaaggctcccgcaaccgcgccagcggcggctccggcctggggctggcgatttgcgttaacatcgtcgaggcgcataatggcacgatccgcgccgcccattcgccttttggcggggttagcattacagtagagttacctctggaacgggatttatcgagagaagtatgaccgagttaccgattgacgaaaacacgccgcgcattttgatcgtcgaagacgaacccaagctgggacagctgctgatcgactatttacgcgcggccagctatgccccgtcactgatcggccacggcgaccaggtgctgccctacgtgcgccagaccccgccggacctgatactgctggatttaatgctgccaggggttgatggattgaccctgtgccgggaaattcgtcgcttctccgacgtgccgatcgtcatggtcaccgccaaaattgaagagattgaccgcctgctggggcttgaaatcggcgctgacgattatatctgcaaaccctacagcccgcgtgaggtggtcgctcgggtgaaaaccatcctccgccgctgtaagccgcagcgtgaattgcaggtgctcgatgcgcaaagcccgctgatcgtcgacgaaagccgcttccaggcgagctggcgcagcaaacttttggatctcaccccagcggagttccgcctgttgaaaacgctctcccacgagccgggcaaagtgttttcccgcgagcagctgctcaaccatctgtatgacgattaccgcgtggtgaccgaccgcaccatcgacagccatattaaaaacctgcgccgcaagctggaggcgctggacgccgaccagtcctttattcgcgcggtgtatggcgtggggtatcgctgggaagcggatgcgtgcaggattgcctagtgagccgctggtcaatccaggccgggtaaggcgaaaccgccacccggcacaataactttacctccctcccccacagcgctacaatgcccgcccttaatgtgggggatctccccttaccgctgcacctggtgcatgcggatctgacctgtcatcagaacgagaacaaacatgtttaaaccggaactcctttccccggcgggaacgctgcaaaatatgcgttacgctttcgcctatggcgccgacgccgtgtatgcgggccagccgcgctactcgctgcgcgtgcgtaacaacgaattcaaccacgagaacctgcagctcggcatcaacgaggcgcacgctctgggtaaaaaattctacgtggtggtcaacatcgcgccgcacaacgccaagctgaaaacgttcatccgtgacctgaagccggtggtggatatggggccggacgcgctgatcatgtcggacccgggtttaatcatgctggttcgggagaacttcccggagatggatatccacctctccgtacaggctaacgccgtcaactgggcgacggtgaagttctggaagcagatggggctgacccgcgtcatcctgtcccgcgagctttcgctggaagagatcgaagagatccgcacccaggtgccggatatggaaatcgaaatcttcgttcacggcgcgctgtgcatggcctactccggccgctgcctgctctccggctatatcaacaagcgcgacccgaaccagggcacctgcaccaacgcctgccgctgggaatataacgtccaggaaggcaaagaggacgacatcggcaacatcgtccacaagcatgagccgatcccggtgaccaacgtcgagcctacgctgggcatcggcgcgccaaccgacagcgtgtttatgattgaagaagccaagcgtccgggcgagtacatgaccgcctttgaagacgagcacggcacctacatcatgaactcgaaagatctgcgcgccatcgcccacgttgagcgcctgacccagatgggcgtgcactccctgaagattgaagggcgcaccaaatcctattactactgcgcgcgtaccgcacaggtgtaccgtaaagccatcgacgatgcggccgccggtaaaccgttcgataccagcctgctggaaacgctggaaggcctggcgcaccgcggctataccgaaggtttcctgcgccgtcatacccacgacgactaccagaactacgagcacggctactccgtttccgagcgccagcagtttgtcggtgacttcaccggcgagcgcaaaggcgcgctggcggccgtggcggtgaaaaacaagtttaccaaaggcgacagcctggagctgatgaccccgcagggcaacatgaacttcacgctggagcatctggaaaacggcaaaggcgaagcgattgaggtcgcgccgggcgacgggcacaccgtctggctgccggttccggaagaggtggagctgaagttcgcgctgctgatgcgtaacttcaacggtgaaagcacacgtaatccacacggcaaatagtcaatcagggaaattttttcgcgctgggataattcttagaatcggatcacataccgcttcgttcaatacgggtattatcccacgcgctgaaaaacataacccataaatgctagctgtaccaggaaccacctccttagcctgcgtaatctcccttacgcgggcttattttttaccttctctctcttcaacccaggcaatgagttcgtcgatttgcttctctgagaacacggcgatcccattctcagcgagcaacgacgccgcaacccccatccccgctttctgtataccgcgaaaagatccgtcataaataaactcactgccgcacgttgggctgccatcggttaacaatgcagcgctacaccccgacgcctgagcagcgcgtagcgcgagccaggctgcaagctgataatgtgcggtcacatcctgcccggtattttccataattctggcttgcccgtgcatcacgtctttgccatcagcgaatataatctctgccggaggacgcggtacaggcagcccggtagccaattcagggcagtggataaccagacgttgttcctgttgccagcgagcgagttgcgcgttcattcgcgctttttcacttccgttataacggaccctgaagcccatcaggcaagcgcttaccaaaattttattcatcatcactttcctgtgattacattaagctcatcgctgaagtgtaacgcgcttttgtgcctgttttgttcctttcatcctgttcttacccgctttttccctctctgctatacactcttactaacgctaaaaaagggagcagcgcggatggcaacctatccagacagtttattgattctcaacggcaaaagtgcaggcaacgatctgctgcgtcaggccattcagggtttgcgtgacgacggcgcgcgcatccacgtaagagtaacctgggaaaaaggcgacgcggcacgctatatcaatgaagccctcgggcttggcgttgagaccatcatttccggcggcggcgatggcaccatcaatgagatcgcgtcagcgctgatcgacctgcccccggcagaccgcccggtgatgggtattttaccgctcggcaccgccaatgattttgccaccagcgcggggatccccgaggcgttagagaaagcgcttcagctggcgatcctcggtaaagcgaccgcggtagatattgcgcaggtgaatgacaaaacctgctttatcaatatggccaccggcgggttcggcacgcgcatcaccagcgaaacgccggaaaaactcaaggcggcgctgggcggcgtgtcgtatctgatccacggtctgatgcgcatggataccctcaagcctgaccgctgcgaaattcgcggcgaggattttcagtggcagggcgacgcgctggtgattggcatcggtaatggtcgtcaggccggcggcgggcagcagctgtgcccggaggcgctgattaatgacggtcagctacagctgcggattttcacgggcgacggcctgctgcccgcgctgtttaccacgctgacgcagccggaagagagtccgaatatcattgacgggaaatccgcatggtttgaggtaaatgccccgcacgggatgacctttaacctcgacggggaaccgctcagcgggacgcagttccgcattgaggtgttgcccggcgcgctgcagtgtcggttgccgccagactgtgtgcttttgcgctgatggtattgccgggtggcggctacgccttacccggcctacgcttcgccctcaggtcaggcaatcgtgactttgctgtccagatagacgtcctgaaccgcattgatcagcttcacgccgtcagccatcgatttcttaaacgccttacggccaaggatcagccccatgccgcccgcgcgcttgttgataaccgcagtacgcaccgcgtctgacaggtcagtatcgccgcccgccgcgccgccggagttaatcagccctgcgcggcccatgtagcagttcgccagctggtagcgcaccaggtcgatcgggttatcgctggtcagcttgctgtaaacgcggtcatcggtgtaaccaaagttcactgccttatagccgccgttattctcggccattttctgcttcacgatatccgcgccgatggtcgccgccaggtggttcgcctggccggtcaggtcagccgacacgtggtaatccacgccgtcttttttgaacgccgagttgcgcaggtacgcccacagcacggtcaccatacccagctcgtgcgcacgctcaaacgccgcagagatctcttcaatctgacgacgagactgttctgagccgaaatagatggtcgccccaacggcaaccgcccccatattgaacgcctgctcgacgctggcatagagcgtctggtcatattcggtggggtagctcagggtttcattgtggttcagcttcacgaggaacggaatgcggtgggcatagcgacgcgagacggaggccagcacgccgtaggtggacgccacgcagttgcagcccgcttcaattgccagctcaacaatgttcttgggatcgaaatagagcggattcgccgcgaaggaggcgcccgccgagtgctcaacgccctggtctaccggcagaatagagagatatccggtgccgccgagccgcccggtgttatagagcgtctgcatatttcttagcacggcaggcggacggttgttatcgaccatcacgcggtcaacgtagtcatgaccaggcaggtaaagctggtcggctggaatggtcatacaacgatgctgtaaaaggctgtcggcgtctttgccaagcaactgcgcaatatcagtcatgtgatactcccgtaagttcgacgtcatgtcggtgtgcgtttatccagtcccatcttttatgggcagactaagcctggtaccgacttaacagattttccaccctttgcaatttttttcagcacaatctgctggctcgattcgtgtacaacaaaactgttacattgatcaaacaatcaccacaaaggtatttaaaaggtattattgaatggtatgttaaaggcgtaccctctctgacatgcaggattcaaaaatgaaaacgaaagtccaactgtcattcatgatgtttgttgaatggtttatctggggcgcgtggtttgtgccgctgtggctgtggctgagcaaaagcggttttaccgccggggaaatcggctggtcttatgcctgtaccgccattgccgctatcctctccccaattctggtcggctcgctgaccgaccgcttcttcgccgcgcagaaagtactggcggtgctgatgtttgccggcgcgattctgatgtacttcgcggcacagcaaacccagttcagcaccttcttcccgctgctgctggtttactccctgacctacatgcccaccatcgcgctgaccaacagcattgccttcgcgaacgtggacgacgtcgaggccgacttccctcgtatccgcgtgatgggcaccctcggctggatcgcctccggtctggcgtgcggcttcctgccgcagatgctgggctatagcgatatttccgataccaatattccgctgctgatgacggccgccagctccgccctgctcggcgtctttgccctgttcctgccgaacacgccgccgaagagcaccggcaagctggatttcaaagtgatgctggggctggacgcgctgatcctgctgcgcgacaaaaacttcctcgtgttctttttctgctcgttcctgttcgccatgccgctggccttctactacattttcgccaacggctatctcactgaagtggggatgaaaaacgccaccggctggatgacgctcggccagttctctgaaatcttctttatgctggcgctgccgttctttaccaaacgctttggtattaagaaggtcttactgctgggtctgatcacggccgccatccgctacgggttcttcgtttacggcggtgcggaacagtacttcacctacgccctgctgttcctcggcattctgctgcacggcgtgagctacgacttctactacgttaccgcgtacatctacgtggataaaaaagcgccggtgcacatgcgtaccgccgcgcaaggcctgattacgctgtgctgccagggctttggtagcctgctgggttaccgcctgggcggcgtgatgatggaaaaaatgttcgcctacaaagagccggtgaaggggctgaccttcaactgggccggaatgtggacatttggcgcaatcatgattgccgtgattgccgtgctgtttatgctgtttttccgcgaatcggacaaagagatcgctgcaattgcggtggttgatggcgataccgcgctgacacaaggggaagttaaatgaaacaagaacgtgttctcggtgccctttacgggcaggcgttaggggatgcgatgggcatgccgtcggagctgtggccgagaaagcgcgtcaaggcgcactttggctggatcgaccgctttttacccggcccggcagaaaataacgcggcctgctatttcgggcaggcagagttcaccgacgatacctcaatggcgctgtgcctcgccgatgcgatcattgagtgcgacggggagattaacgcggatgttatcggcaagcatatcctgaactgggcgctcgatttcgacgcgttcaacaagaacgtgctcggcccgacctcaaaaatcgcgctgaatgcgattcgtgacgggaagccggtcagcgcgctggaaaacaacggcgtgaccaacggggcggcgatgcgcgcctccccgctgggctgtctccttccggcgacgcggctggaacactttgttgaacaggtggcgcaggcctccagcccgacccataaatcggacctcgcgattgccggcgcggtggtgatggcctgggcggtttcccgcgccatcgacggcgaaagctggcagaacatcgttgatgccctgccggggatcgcccgctatgcgcaggagatgaaaaccaccaccttcagcgcgtcgctggcggcgcgtattgagctggcgctaaagaccgtacgggaagccaacggtattgagtccgccagcgagcaggtttatcagctgattggcgcgggaaccagcaccattgagtccgttccggcggccattgcgatggtggaactggcaggaaccgacccgaaccgctgcgccatcttatgcgccaatctgggcggtgatacggacactattggcgccatggcgacggccatctgcggcgcgctccacggcgtgcaggcgattgatccggcgctcaaagccgaactcgacgccgtcaaccagctcaacttcggccattattgcgagaaactgctgcacttcagggagcaaagggagggcgtatgaatgcatttgcccaacgtctcgaaaatctgcacgccacgcgcccggtgacggtgctgggcgccgcggtgattgacgtcatcgccgacgcctacgccctgccctggcgcgggtgcgatatcgaacttaagcagcagggcgtgaatattggcggctgcgcgctgaacattgccatcgccctgaaacgcctcgggatccccgcgcaaaatgcccttcccgtcggccatggcgtgtgggcggatattatccgcaacgccatggcgaagcaggatctgcacagcgccgtagaggctgaaaccggcgacaacggctggtgtctggcgctagtggagcctgacggcgagcgcacctttatgtcctttagcggcgtggaaaaccagtggcagcagcgctggttggatgcgcttcacgttccgcaaaacagcctggtttatctctccggctaccagctggcctcgccgtgcggcgagctgctgacaggctggctggagggattacaggacgtgacggcctttatcgatttcggcccacgcatcgcggatgttcctgatgcgctgatggagagaatcatggcctgcaggccaatcgtgtcgctcaatcgtcaggaaacggaactcgcggctgaaagactgggcgtagaggctgaaaacctgggtgaagtgtggcagcagcgctttggcgccgcgctgatcgtgcgccatgataaagacggtgctacgtggtatgacggtgacgcctcgggcgttgttccggcgtttccggcgacggttgtggataccattggtgcaggcgacagccacgcgggcggcacgctggccgggctggctgcgggatggtcactggcagatgccgttctgctggggaatgccgtggcgtcatgggtggtcagccaccgcggcggcgattgcgccccgacgcgcgaggcactactcctcgcacacaaagacgtatagatcgctgcgacagtagctgatgctgtactcaatcggccggtgctgctggtcaagcgcgacctgcttgatcaccagcaccggtattttttcatccatcttaatgtgcgtctgaaactcgctgtcgggcatgcgggcgctcacccttgagcgggtgcgctgcgggtagatattctgactgcggaagtagtcatagagcgaaatgccaatcgcatccgggtcgggaattaacccgacggggacccaggactcttcaatcgacaccgcatcgtcatcgacatagcgaatgcgcttgagcaaaaagacctcgctgtccggggagatcgacaggtggttggccacctcttccggacacttcaccacccgcttgttgacccagagcgtattcggcttcttgccgcgcagcaccacctgctgggaaaaaccgcgcgcctctttcagcgaatattcgaagatattgttgatttgcgtgccatagccacgggcgcgcgtcaccacgccctcttcctccagcgcctgcatcgctttacgcacggtaatgcgcgacaccccggtcaactggctcagatcgcgctcgccgggcaaaatattcccgtgctccagcaccccgctgcgcaccgcgttttttaccgtttcggcaaacttcaggtacagcggcgtgttatcgggcgcggcgatccgttcattcagttgagcgattaaccgggtatgcgcttgttccatctctgttttctcaggcgtgatgtattctgccagtatactggcttaccaccatgcatgaaaatggtgtaccggcccaataccgtgaccgacttccagagtatcggcttttgccagtgccgccgagagccaggcttttgcttcgctaaccgtatcggcccagctttcatgacgtgggcgcagcgccgccagtgcggccgagagcgtacagcccgtgccgtgggtatttttggtctgcacgcgcggcgcggtaaagcgtacttcgccgtcgcgggtaaagagccagtccggactttccggatcatcaagatgcccgcccttcatcagcaccgccccgcagcccatcgccagcagcgcattgccctgctctttcatttcccgttcagtttgcgcgtgcggcgcgcccagcagcgcggcggcttccggaagattgggcgtgatgagcgctgcctgcggcagcagcttattgcgcagcgtctcgacggcggaggcggagagcagcggatcgccgctttttgccagcatgacggtatccagcaccacgttttgcacctgatagcgcttaagccgttcggccaccgcttccacaatgtccgtttcggccagcatgccgatcttggtggtatcaatacgcacgtcgctgaacaccgaatccagctgcgcggcaacaaaatctggctcgatgcggtagaccgactgcacgccgcgggtgttttgcgccaccagcgcggtgatgaccgagcagccgtacgcgccaagggccgagaaagttttcaggtcagcctggatacccgcgccgccgctgggatcggtgccggcaatggtcagggcgttaattcgcttcatgcctgctcctccagcgtgcagagcgcatccaggaacgcgctggcaaaactgcccgggccacgcgactgcgcaacggcgaccgttccggctcgtttcatccatccgcaggcggcagcgatgttatccagccggtcacccggcagcgagcagctcgccgccacaacggcagaaagcgcgcacccggtgcccaccacgcgcgtcatcagcgggtcaccgccggtaaccgttcgggtacgttgcccgtccgtgatgtagtccacctcgccggtgaccaccacaatcgtattgatctgccgggccagcgcctgggcagcaggcaccgcgctggcggcggtatcggtcgtatcgacgccgcgcccgcccgcgctcatcccggcgagggcaaggatttcggaagcattgccgcgaatggaggccggtttcagggcaaggatttgatggcaaaaccgggtgcggaacgccagggcgcccacggcaaccgggtccagcgtccagggtttgcctgccgctaccgcactttcaatggcacgacgcatcgactgggcgcgcagcgcggtcagcgtgccaacgttaaccagcagcgcatcggctatcgcggcaaactgctcggcctcttcggcctcgatcaccatcgccggtgatgcgccaagcgccagcaaaacgttggccgtaaaggtctgtacgacatcgttggtcatacaatgggtcagtggagaacgggttcggaagtggtgtaaaacgtgtaaatcgagcaggtcaggctgcatgggttcgctcctgccttgcgtgaagaagcgatgaccgggaaggcatctgacttccctacgctggcattatccagatcaggtaatacgggtatttctcagcccatcagtgatggggcaccccgagtcatgaagattgaatctctatactttttgccagcttaggggaagttgcttgctcttgcaagcccacccttccggttatcgcttcttcacgctgtaccccaccttgtacctcagtttgtaccccatatctgtatgacaaaaccccttgattatctaaattagctaatttatattatttatctaaacttgataagtgagatatgcaaatgacagaaacccagatctacgagaacattaagcaagccatcaacagcgcaccgcgaaatggtcaaacggttgaaatgcacctccagatgatcaaatacgccgaccacctgaaaaacgtcactgctaaagagttttgcgagggtgtgggacttaaagccagttttggtactgaattcagcaaaatgaggaatctcaccgaacggcttaaagccgctgggcttgatacctcgaagctgtgattaacaagatcatcggtatctacgtttagttaacgaggttggatggatgagtgcacgtgaagcatatcggcagtatcgagaagcggtgactgcttgcaagggcatttttgcccgaggtggtaatgtcactggtgattatggtgaacatctcgtaaagcaactttatggcggtgaattattgccaaactcccataaaagcgccgatgtaagattaggcgatggcacgctattgcaggtcaaaaccagagtcaataaaacccagttaggcggaattcgctcctgggatttcgattacctgatcggtattcagcttaatgacgatgccgaagtcatgttggcagttcgtgtccctgtagatgtttgtcgccaaattgccggatatgccagccatgataacaaatttgtgatccatcttaatggcgtgcttcttaaaacgcctggcgtagaaaacgtcaccgaagagtttcagtcagtgtaatccctaagtgttcgtttttttcttttctggatgcgggtggcaatgtaccagacagcgcgaaagaataagaagatgtagagctgggtaatcataatcctcctggttaaaatggtattgaatcaaaatcttcttccgtttgcggagtaaagacttctgttcttccagtgcgttcagaaaccactctggaaattagttggtaggctgcgttctcatcacccattgtctctgttagcgcccatttcacagcggcatctggtggttgtccattcggtttgcaaatagctacaccgccccagggaaactctggactgtcctgctgaatgggcatcgttggtgccgattgataatcaaagtcatcccaggcacaaggaatgtcatcccaatcaggaattgactgttcctctgcggccttaactggctcaggggctggcacttcgtcagacactgctacaggcagctgctctgttaatgcttctggtggggtaatgtgagcatcggtgaaaggaaatgcagtgtaaatgctcgtttgccctttcctgtcctcgacgtggacaactcccaaatcttcaaacatcctgataatgtttcgtgcctgtcgagcctccaccctgccaactttgcctaatgtatcttggttggcgtagcattctttaccttgctcgaattatacacaacagaaaaaagaggaatacttgtcagatatacttacatatgctgatatagctgatattatccgaatgaataaagagtcggtcatgtctttcacattatccaagtacttaaatcttctcagcttagtatctgatgaggagaaaataaaagaactactattaaaactccaagttaaatttaaaagtttggatcatttgctaaattctgaaacaatatatgactttgttgttcaacgaaatctatacgaaattaatatcaaaactttatcagttattttaaatgatgctcccaatataacgtatgctgcagttaaaaactctgatcagcaggctgttatcaattacgtaaatgacaatattgatatatttgttgaaaaagttttacttactgaggagattgaggaaccagaggaaagttttctggagttattaaatcgggaggatttagataagagagtaaagcatgcaatgatcatgaaaaaaacttttgccatctcggatattggtgaattgattaaagagttatggccaattgtgatccgtgaaaataaaatggttgcatgctggtcaaacgttattacttcttatgtagaatacaataaaaaaatgcctgatttcttaatagctttcttaaacaatcctgttaatagaaaagagctctctaaaaataatatagaggcgtttgatgataaatttgacgaagcgattttagaagatatctcagaagaaatcattaatagtcgggatattacagacgaaacattcgaagtgttaattgctagtattcaaagttggatttactttccgctcggaaatgttagtgaaaaaagagcaaaattattgattgataatgatttgttatctctaacaccggaaaattttaaagagttaaaattaaattttgatacacttcatatccaactcgctttgagaaaccctgacgagtttattgataaacaaggtgatttttcccttgatgccaatgatataaagcaactcatagatagcaacgagctctctcaatttaacaaagaaatatttgtacaacatttaaattctaactgtttgacagatggaaataatgatattcttaaagatacaatttattttattaatgagcataacctgaaaatcaccaatgaactactaacctttttgcttgaatcacctacaacattggatactaggttatcgttgctagctggacaaataaagcatattgataatgaatcaattactgaatttttaactaaaataggggaaccttactctgaaattgctgaaaaaggcagacgaataaagatctcaaataatagaactaataaagcgttggtgactgcattagagtctaaaaactacatatcctcttttaaagaagatagagagagattacgtgtgaatactaaaaaaaaataaagaataactaatgttttttaacgtccagttttaattgctgggcgttttacttattgagattattttctttcaaatattcttgatgctctttctccagcttatcagtatcatccttgaatatataaatcttatatttttccttggcttctctagacagattatcttttaaatattcacggagttttgcttcacttttggtttgatccatgcctattgtaattgccggatctgttattccaatttcaaaactaaataacccaaattcatcccaagcactttctaaaacttctacaggggtctttttgtttgattcgattaaagttataccccacataatcaaagcaggaactaagaccaaaaatccaattaacctcttcttcattcaccatcacactctccctcgtcgaaaagaatctctcctttattaatactacggatatcattattgacctttatattttattaccaacatttacatcgaacttttgttctgatctatattgaataaggaacgtttgttctgttgatattagatcaatcaaggagtgagtcgatatgtttagggatcgaggaactatcaatggacatcaatgatgctagaacaattaatacagcttaaacaagatttgattgatggatcaaaagttgaaaagccatctttagatgacaaacaaattgatgagatggatattctcgtttctgaggcattggaatttaataaagagttgaaattcaaactctttaacaagggatttgttgaaaatgttaccggcagagtacattacattaattttgaacaacaaaagcttcacgtaaaagaccagaacgacaatacagtttatatcaacatgaataacatcataagagttatatacaatgactgattactcacaatttccacgtgagaatatactctgtgtcgatatgaaatccttttatgcttctgtatcggctgtagcaatggggcttaatcctttaacatgttatcttgccgttgtagggaatacggatagacagggaagtgtagtgttagctgcatctcctgcacttaaaaaagattttggaatcaaaacaggatcgagactatttgagatacctgaagatccaagaatatacattgtaaatccacaaatgaagcttttcatcagagtttcaactgagattacaaagctgttttacagatttgttcctgaaaaatgtgtccacacgtattcaattgattaatcttttttagatgcaggaaaagagaatcctgaagaaatggccaaagcaatccaaagcagcatgtggagagaatttggtttgatgtgcacagttggaattggtgacaatatgttgcttagtaagcttgcacttgacctggagagtaagaaaacaaagagtggtattgcacgttggagatatgaagatgtgccaaatagactctggaaagttcgacctttgtctaaaatgtgggggataggagggaggatggaaagaaatctgaatcgaatgggtatatcaactgtaggtcagttagctaaatttcctttagagctgcttgaaaagaagttcggaataatgggaaaccagttgtactatcatgctcacggaattgatttatctgaaataggagctccattgatgcaggggcagattagttttggtaagagtcagattttgtttagggattatacaaagagagaagagattaaagctgtgctcttggagatttgtgaggaagtcgcaagaagggcacgtacatataataaagttggtcgaacaataagtctaggaattggatacagtaaagatgagcttggcggtggttttcatcgatccaaaacaattgattttcccacaaatatcacgatggatatttataagtgttgcttgatgttctttaataagttttactcgggcaaaaaacagtgagaagtatctcagttacgtttgcaggtactgcgctccacagagcagggctgaccggtggacataaatcataaaataaaagcccactcaaatgtttgagtagggctaaattaattaatcaaccttttttaacctccgactggcctttcagctacctggatgttagatggtgaatctgtactcaattgcgttaaagctactccacttaaaatcacagctaaaatagatacgcaaagcacaagttttttcataagattccctccacctgattcattttctgttcagcccaaattttcgcattgaaaaagctcgttgcttcttcaaaagcacctattgattcaaacctttttgcagctatgtaggacaattcatctacactttcaagttcattttgctgttttaaaaactcaatattactaatacaattattgaaattattttttaattccccacaataaaggttatacaggatgctgattttggcttcgtatactttattctccattaatatgagtctttcctgtgctttattgtaaaaattaatggctttcattttttcgtcaattttaaagagttctttaatcatcatgaataaagaatttatataataaatcgaatgtaaccaagattcatttcctattgctttttcaagagattcaatgcatttatcaggtttgttccaatcagaataaacgatactaagattgtgaaataattgagcttttaaaaattcatcttttgtttcttttgcaatatcaattgcttctaagtaatattgttctgcttcctcaaatcgtttcatatcagcatagtttgcagctgcaatcattgttgatgtagctagtttgcatttataatcagggtgtcgcttatatattgaaattgcattttttatataatgttgtgccacaatgctttgtttaacaagagtatataagtaagagactttagagtaaaattcagctgcttcaatttcatctggaatttctgcaagctttttctcagctaatccatataggttaattgctcgatcatagtttttgttgtatgcctcgtacattgcttcaaataaataaaagttgtattctaatttatcatttgtttttgttatgaagttttgattgtcttcagtaaaataggtgtgcttttgtaaaggctctcctcgtgaagaatgcagcaacattttatgtctttcttctaatagactataatacgcaagaacttcttgatcttcttccatttcatcaaaaagtttctttatctctgaataatattttattgattcatcaaccttttgtttttttatagcaatgtaccagtcattcagtgtagtagcgacaacttcagaagcgatcttactcatttaaacccctctttctgaaaatttcaaaaatctctcgaaaacaatcataacatagtcattgaaaaaattgtaaaaggatgtaaagttttctgcaattttttcatttgaaaaaacgaaaaaaataccctcctcaatcaagagaagggtatggggtttatctcggtgaatcataatccattgcttgttcactatcagaaataccttgagttgttggatcaacaataatgcccaatgcagttaaaaaagtcagaagagcattaaatttctctgttaaatcgtcaccaaatacagtcaagtcatatccaaaagcaaaggcaattgcttatcgtaaaaatttataatgagctaaaaagacagtaaacataagaatttttgatactttaattagtaaatagggggtaaacgatcgtaaaacataagcgggagtaggggaaagtggttgttttgggaagatatttataaaaaaagaaaattttaagaaggaaaaacgttgatactataggcttttacgatagtgattacgatgtgaaaaagggtgattttgatgtggaattaggaaaatgaaaatttggatagggtgtggaaatggaagtgctatgggtacatttgttcttgcttttgagtatttggatgttaatacacccccagataatggtagtgtaatccctatataataactcttatacctgcatttcagttacatataatggttatgatcgaatgctttatggatgcatctaaaaaagggaaaatcaagaatatttttttgaaaaagcagaataacttctgtcttaaaatgagataaattattttgtttttgatcgttatcgtaacaggaaaaattaatacgaacacttattatgtccttaataagcaaaatgttctgagtaaagtactatatattcaatgatctcgactgactaaaccttagatgcaatataagatatggactcagcggtaacagaagagaaggaattagggaaagcatttgatttcatacataaaagaccgcatagaaagaaatatcttgcttaaaaaggtgaaaaaggagctaaaaaagctccctataagtttaaacaacttttgtataaatagccgtataaaactgaattgagtaatcgaaataataacgtgtgagagtataagtatatccattgtattcaatagaaggcttgaagtttggtagggggctaagctgatatatggtgtcataatcatattcatcactttttactatcacttcagacgaagaacttgttgccaagacaggagcagcagataccagcatacctaatgataaagcagaactcaataaaatttttcgaaggttcaaatatatcaactccatttacattttatatattaattatgagttaaatggaagttgctttggaagtgactaatggatcataaatagttaaaatcgtgattttaaacaaataaattaggagggaattatggctgacagatatgtattaattgaagtgaatgaagacggagaaggaaggttaaaagatgaagctgttacttggattgacttccgattaagcattgtagattttaatgccagtgaaggactaaatcaattaatggagcaaatatcaaaagatgtgaaagatgagttagttttggttctttttaattatcgtgttaagtcctcttatgattcttggagtggagcaactgaatatgaagacttctttgatgttgaatttttcaaagtaattaaaaagaattataagaagttttaccaaggattagtgacagtagaattagatgtcggtattaatggttttgacaatattgaatctatgccaaccgactctaaccaaaactattatagaaacttaattgctgagtgggaagagttttacaatgaagattttatcccattaagtctaaataaaagatagtttttaactaaacatataaggatggatcgttatcgataaaagtacacgcatcgataacgatcgcagaaggggatgtaaatttctatagcggcgtattttctcgaaatagcctggatacttattctgctttgatctggatttaaatacagaccaaattacagcagctagtgtataatccaggactttatcaaaagtccaatttgtaaaaagatcaagaagaaaattcattagctttcacctccaagacaaaattgtcctatctctcttagatggcatgtgtatgacacgcctctataattaaaagagtgaaatccaatatgaaaatctaaaaagaattgaaaaaacataaaaaaaatataaagggtgcagtaaatgacggaaattaaagcgaactcaactgtaatgattcacgtactggctgacgaaacacttagcagcatcaagcgcgaatacgtagaggtcgatcgtaaaacggagattggcgagaagatcattattgttgataaaaatgatccagatgatgaatacgagaacggagcaatttaatatggattttcaattttcaaaattgtaaggttaacttatctacccggaggtgatgttagtgtatataggaaatggccattactgttattcaaattcaactgcaatgtttctttcatcaataggagaaaatgtatctcctcaacttgtagagatattaactggtgttgggttaggtgccatgatagaatatgaaaaaaacctttattttagtatgagagatcctgatgatggtatcaattatgctttaaacatccttggatttactgcagaagaacatcagcaagctagtgacttagatgacccatttccgttattaaaacagcaaatcaaacaaaaccctgtcattctaggccctttagatatgggggagctaacataccatccgaatcataaaaatttaaatggttctgaccattatgttctagggtaccaaatggataatgaaaatatttatgtgcaagatccagcaggctttccatttgttccattatcactggaccaatttaagaaggcttggatggcggaaaggattccgtataggaaaggaatcaataaatattggtctacagcaaaaaaggttgtcacattagacaataacgaaatatacgagagagcaattgattattttaagagaacttatcggaaattcgaaaaagtggatatagggttaattggaagggaagcaatttgtttttatgctgatcaattattaaatgcccctattacagctgatactataaggcatacaacattcttccttttccaattaagtgcaagaagggccaacgattatgcaatgtattttaaagataggcattcacatttatcagtgttgaagactgaacaggctaaggtgtttgggatatgtcattctatgtctgtaaataaagattggaaaggtatatcggagaagttaatgaagctagccgatttagaggataattttagattggaacttttaaaagtcggctattaattatagagatttccactttaacaaacggggcgtttgttcaataaaggtctcaatacatattatatatatcaactatgtatgagcccttattttaattttagtcttgataatttaagctcagtgatatagctctcgtcatcaaaaggctcttttattgaatgcaatagcattggagatacaaacaaaataccacctcctacttagaacatattagctaagaggaggtggtatataaagcgatatggcagtggtacttaatgggattcaatgagctcaggtgaattcactaatgaagatacctgatatgcttccatgtcatcagcatcataaggcagcaacaagctttgtagataatcaggatcagtatttttaggatttagccattcctttttgttctcatcagttaggataactggcatccgatcatgaatgtcttccataagctcactaggctttattgtgatgattgtgcaagtgtacaacagattgccttctagcgtgttccacttttcatataagccggcaaaagcaaagagattcgacgatttaagtttaatccgcataggaatcttagtctttggatcaaggcgtttccattcataaaaactgtcagccggtatgatacaacgtttgcttccgagcggctttcgaaagctgggtttctcggccaatgtttcagcacgagcattaatcattttataaccgatcttttcgtctttagcacaaggagggataagaccccatctaagtttacccagacggttattagatccatcgttgataattgtcaggatgttttgtgaaggagcgacattatagctagggtgatattcaccttcaggtaagaattgatctatgttgaattgctcaatgatgtcatcaaactcagaaaataaagtgaacttgccacacatgttcatcatcctttagggtttttgaatattgtacaggcttgatacacaaaaatcaaaaaggaggaatgtgatgcagcagcaaacagttgagggttaaggaagttgaatggagaaagaaaaggtcagtgatatttatacaatacattaaatagtttttctataaatagttctgatagactgtacaataataagaacgcccccatatgggggcttggatctgcttaataaccattaaatcccttgatttcaaagttttcagtatcgagatttaggctattcaattgctttaacaacacctcgaattttaagcagtcaccgtttcttaattcttctggaatatcttcaggatttgcagttttcattccattctcaatccactgttttcggtataactgaattgcagcgtcaattaaataatctggagttacaataaaacctaagcttacgtcatgatcttcactgtagccgtattcaaaatcacagcaagggcagatatcaaatgttttttgatactcaccatcattgtttaatgggttttgaattaatcctttatatccgcaaattaaacatgtatataattttggcatagcaatccctctttatatatttatagttcctattgatttttataataattataaccagcctttttatttggatgttttggcttaaagtaagttattatagtgtccttattacctgagcgttccacagataaaaattcatttgtctttttattatacttatacaaagggattgagacagttgcaaggaatggtgaaccgtacacagttttgaacgatttgctgtttgctgcaggcaatttacatattggtctggggcacgattatttaaagtgcattgccttactaatcaatgtcaaaagattttttagtttaacagagtcatatggaaatatttcagataaattagctgttgttgctatgaaaggtgtgcaatttgatcagtttgaagaagcttacaaagcttataaagaaacagttgcaataaatcaaaatagcttagtggactttttaagtgctttaattactctgataaaagcaggtgagaagctacaaaaagctggtgaaagtttagctatcatcatgaataaacttcttgaaatgagtccagaaaattcaatgaaataattgttttatgcaaaagcccttatgagggcttttttaattgttgtttgcagtaaccaacttcaaaattttccgtataggatctaatatctcaggggtaagtttatatccatcccagtgaatatctggtttttctaaaaactcttttagattttttctttccactttaggatcaggatcatctgttaatccaagtatgtaatcaactgaaacatcatatagtctagctaaaataaccaacttgtccaatggtggttttttgctttcagcttcatacccgccgtaacttgattttgcaattccaattttctcagctaactgttccattgttaatttgtgtgcctttcgtaattgccgtaatctttggcaatacattttgaataaatgcctcccaaaaccatctagttcaattatatgagctttcatttctcaataaaataaaaaatctcaaaagaatttcaaaattttcacgatttctggcggaaaatgcattataatgtgaaagcattactttaaaaatggtagcaatgaactaggaggaagtcatggtaagcaagaagaacaaaattgtagcggcattattagcatttttcttcgggggtctgggaatacataagttttatttgggaagagtaggacaaggtattctatatattttgttttgctggactggtatcccctctattatcgcatttattgaattcattatttttctttgtggtagcgaagaagggtttgatcaaaagtacaatttttattactttcagcagcaatctaaagcttaattttaaagagggatatacagtccctctttaaataaaaaaagaaagttaaagatatttattttgaattggaggctcggttacatcccacagttaccctgattgtcaattcttttttttctttttcagagccctttcaaataaaaatcttgcaacttctttgtaaaactgatctaagctatcatcctcaaatttggtcaataattttaattgagcagttctttcttagtataaccttaattgttttcttcttcagttcttcatattcttcataaatttgcttcccttcattagacaagcggcagctacaataatttcacaatctctaatgtatatctcctttatttgaaatggttcaatgggaattcattgcagatattactccatctgaattagaaacaagaattgtgatcctgcgaaaaaaggatcaggatatggtggaagaagaccacttataatgtgtttctaggtatttgtaattgaattacaaatacttttaatatttgctcatgaattcgtggtattatactgaaggggacgatcaaaagctttggcgttagtaattaagaatgttttaaatgtatacgagtgctacctcaaagtcggaaaaaatattataggaggtaacatatgtttaagtttaaaaagaatttcttagttggattatcggcagctttaatgagtattagcttgttttcggcaaccgcctctgcagctagcacagactactggcaaaattggactgatgggggcggtatagtaaacgctgtcaatgggtctggcgggaattacagtgttaattggtctaataccggaaattttgttgttggtaaaggttggactacaggttcgccatttaggacgataaactataatgccggagtttgggcgccgaatggcaatggatatttaactttatatggttggacgagatcacctctcatagaatattatgtagtggattcatggggtacttatagacctactggaacgtataaaggtactgtaaaaagtgatgggggtacatatgacatatatacaactacacgttataacgcaccttccattgatggcgatcgcactacttttacgcagtactggagtgttcgccagtcgaagagaccaaccggaagcaacgctacaatcactttcagcaatcatgtgaacgcatggaagagccatggaatgaatctgggcagtaattgggcttaccaagtcatggcgacagaaggatatcaaagtagtggaagttctaacgtaacagtgtggtaacagatcatccttaatcaggggtagctaacgggctgctgatcgttccttgagaagttttataatcaatgattattaaaatcgttagtaatggttaaaggttgttttctactaggtgaacggccttggaattgctggaggtagggtattctccatctggttttaaaactttccctataggttaatagaatggtatttaaatgagaatgctatcaattttttgtagtcagcgcttgctcacaacagacacctttacataacccttctttatcaaacataagccttattcaaaataaaaatatctagtagttaaccagatcctcataactttatactagttaaaggtgggactgttaagaacaaaaagtccaatttatgaatggggactctacgaacaaagcaagtaagttcaaaaagaacccaactttaggatttccttagaggattgaatcagctcaaaccaagttttttaatgcgactagctatggaaattaagaaaagaacctggtgaaatttcccaggttctttttatattgcacaaaaacagacacggtgatataatcacactacgtgcgctttctagttaaaaagttatagatatccatcttataattttattatatcctgctaggaagctcttgtcaatatttttttttgaaggggagatgtagaatgagttctttggttctcggtttacatgaaattgaaaaaacacagctttcgctcgttggaggaaaagggttacatttaggggaattatcaaaaattcaaggtatacaagtaccagaaggattttgtgtcacaacagtaggatatcaaaaagccatcgaacaaaacgaaacgttacaagtgttgttggatcaattgaccatgctaaaagttgaggaccgagatcagattggtaacatcagccggaagattcggcaaatcattatggaagtagacattccttccgatgttgtgaaagcagtggctcaatatctctcccagtttggcgaggaacatgcctatgccgtgcgttctagtgcgactgctgaggatttaccacatgcttcttttgccggtcaacaagacacctatttaaatattaccggcgtcgatgcaatcttgcagcatatcagtaaatgctgggcgtccctatttacggatcgcgcggttatttaccgtatgcaaaatggatttgaccacagccaagtctatttatccgttatcgttcaaaggatggttttccctcaggcttcggggattttatttaccgctgatccgattacctccaaccgaaaggtgttatccatcgatgccggttttggacttggtgaagcactggtttctggcttggtatctgccgattgttttaaagtacaggatgggcaaatcatcgataagagaatagcaactaaaaaaatggctatctacggacgaaaagaaggcggaacagaaacacagcagatcgattctgatcagcaaaaggctcaaacactgactgatgaacaaattttacagctggcacgcattggaagacagatcgaagctcatttcggccagccgcaagatatcgaatggtgtttggcccgcgatactttttatattgtacagagtcgtccaatcactactttattccccatccctgaagcgagtgaccaagaaaatcacgtctatatttctgttggtcatcaacaaatgatgacggatcccataaaaccactgggattgtctttttttctgttgacgactgttgcacccatgcgtaaagccggtggaaggctatttgttgatgtcacacatcatctggcatcccctgacagcagagaagttttcttaaaaggcatggggcagcacgatcagctcttaaaagacgcacttatgaccataataaagcgacgagatttcataaagtcgataccaaatgataaaacagcaccaaatcccagcagaggcaatgcagatatgccggctcaagttgaaaacgatccgacaatcgtgtctgatttgattgagagcagtcaaacatcgatagaagagttaaaacaaaacatccaaacgaaatcaggatcagatttatttcgttttattctggaagatattcaggaattaaagaagattttatttaacccaaaaagttcggttctaattcgaactgctatgaatgcttcattatggattaacgaaaaaatgaacgagtggttaggtgaaaaaaacgcagcagatacgctttctcaatctgtaccccataatattacttcagaaatgggtcttgcgctattagacgtcgcagatgtgattcgtccttatccagaggtaattgattacttacaacatgtaaaagatgataactttttggatgaactggctaagtttgatggcggaagcaaaacccgagacgcgatctatgattatctcagcaaatacggaatgcgatgtaccggagagattgatatcacaagaactcgatggagcgaaaaaccaactacacttgtcccaatgattcttaataatattaaaaattttgagcctaatgtcggccatcggaaatttgagcaagggcgacaggaagctttgaagaaagaacaagagttattagatcgattgaagcaattaccggatggtgaacaaaaagccaaagaaacaaaacgagcgatagatatcatccggaatttcagcgggtttagggaatatccaaaatacggcatggttaatcgatacttcgtttataagcaggctttactgaaagaagccgaacaactcatagaagcgggcgttattcatgaaaaagaagatatatactatctcacttttgaagaacttcacgaagtcgtgcgcacacataaactggattatcaaatcatcagtacacgaaaagacgagtacacattatatgaaaaactatctccaccacgtgttatcacgtctgatggtgaaatcgttacaggtgagtataaacgagaaaatctcccagccggagcgattgtaggtctacctgtttcctccggagttatagaggggcgagcgcgtgtcattttaaacatggaagatgcggatttagaagatggagatatattagttacctcctttaccgatccaagctggacaccattgtttgtatccataaaaggcctagtcaccgaagttggggggctgatgacccatggagctgttatagcccgtgaatatggcttacctgcagttgttggcgttgaaaatgctgccaagctgataaaagatgggcaacgaattcgcgttcatggtacagaaggctacattgaaatcttctaatgtctgatgtgtgtagagaaccgtcagatattccgccatcagccctaactagaagttgggaggctgcatttgtaccgaatgataaagttcccgttgaactaacgaagatcgatagcacattaagaaaagctggaacctctttgaggaggtctggcttttcaatataaaattggcgtagtgtacaaaagccgtattttgcgggcggcacttctttaaagtgaattttttattaccagcatttaaaaccaaactttagattttgttcgtgtcaaagagaactggagaatgttgatgttgtatttgataggggaccacatagaaagaaataccttgcttaaaacaagagaaaaaggagctaaaaagctcctttataagtttaaacaacttttgtataaatagccgtgtaaaacccgattgagtaatcaaaataatgacgtgtaagcgtataagtataaccgttgtattctattgttggctggaagtccattggcagaggactaatgcggtatatagtgtcataatcatattcttcattttttactgcaacctcagacgaagtgccagcagccaatgcgggaaccgcggatattagcatgccaaaggataaagcagaactcaataagattttcctaatcttcaattacatcaactccatttacaatttatacatatattatgttgtaattggaagttattttggaagtgaataatggatcataaaaaaagtaaaaatctcgattttaatggaagttgcgatagtaaacgacagtaaggataagtatatttatgctggaatccagaaagaagcggccttcaataatatatttgaaagcgcaaaaatgagtaagcggataatatcgagggctaccacatgcaaatatttgagaaagaataaaaagaaggttgaggaattggagaatgagtatgctgctgttatgaattgcaaaaagaagtagatgggttgggtgatatcctgttgtttattttaaagatgagtttaaagaggaggaagaaagatgcctaaaatcggagtaagcttgatagtgctcattatgctcattattttccttgcaggctgcaataaaaatgaacaaaacggagacgaaacaaagatgcagagcctagtaggctatgtcgtgcttaaagacaatgaaagggcaattctcattaccgatacaaaagctccaggaaaagaagattacaatctttctgaaggacaacttatgaacaagtttaaaaataacatagtaattgtaggattaagtgagattgataacacagatgatctcaaaagaggtgaaaaaataaaagtgtggttccatacacgaaaagagtcaaatccaccaagtgcaacgatacaaaaatatgaattattataaaaaaattgttgaattctcatatagataacctctgagacaacaaatgttgttctattgcattgaaactgccagtgaccaatatcaagttcagttatgttaattcaagtggtttgatatgttagtgtcttcgaacgagacgaaatattggaagtgagtccggatattcatgagtattacaaattggtcacagaataagagacttaagagagttgtctgcattgtatgttcacttgtatctttataatggcttgcactaaggagtatattcttggaagaaaagaaaacggattttagggtgcttagtcttaattcttgtcagattcaaactttacttgttccataaaatgaaaacttgctgttaattataataatgtttaattttgtggtgtttaaatatatgattctagaggtcttatgaaagaaccgttcatcaaaaaatgaacggtagaagttaaaaaagtaatgtcttttcctttgtggcaaaaggctaaacatattatttgagatcgttaaggacgacttttgcagcctcagcgataagagcattatcataattagcatctttcgtaaagcggtttgacagaattgccacaacaataggagctctgtttggcggccaaacgatagcaatgtcgtttcgtgtcccgtaacttccggctccggatttatcgccgacttcccatcctattggagcgcctgcccgaatcagttcgtcaccagtagcattgcctcgcatccaatcggttaagatcatgcgtttgtcagtcgtgagagtgttatctaaagtgaaggctttaagatcggttgccagtgcttttgcggtgctggtgtcacgaatatcaccaggaatcgcagagtttagatccgtctcgaatcgtttagctttcgttacatgatccccaatctgtttcagtgacttttcaaaacctttagggccgccaagctgttgcaacaagatgttcccagcggtattatcgctgtaacggatagccgcttccgagatttcttttaggctcatgcctgtatctaggtgtttctctgtgattggagaatatgtaacaagatcgtccttgctgtagtggatgacttcattaagtttttcaattgagtttttcttcaggacagcagctgcggctagaactttataggttgatgcgtaagcaaatcgttcattcggccgataggcgattgtcttgtttgaacctatatcaattgcataaacaccaagcctggcatcaaattttttctcaagttgaacaaattttttattcgttatacagcttgccatgtttgtgtcttctatggattttgcttcggcatgtgttgagttgaaaaaaggtgtgaaaccagtaatgcttaaacataaaagcccaacacatattccgaattttattgacgctttagttttcaacttcatcaggcctcctcattcaaatgattttgtattacctttgaaatgtttcccatgacagttagtgtaacaaacccctttgcgctagtaaacatagaatcaattgatcttatatttttataagttgggagaacaagggcataagaatagaatcaacaaaaaagctgacaatgactgtcagcaaagtcatctattagaaagctttatcaattgtgattggagtgttattggatgcaaacgagaaaagtttatctctacgtatttcacacaatgtcagactgggaatatggatatttaattgcggaactaaactcagggagatactttaaacaagatgcagcatctttaaaagtagttacagtaggggttaataaagaaatgataactacgttgggaggattaagcataaaaccagatatttctcttgacgaatgtactcttgggagtcaagatcttatcattttacccggaggaaacacttggggagaagatattcatcagccgatcttgaaaaaagttggcgacgctttaaagctcggcacgactattgctgcaatttgtggggcaaccttgggcctcgcgaatgaaggatacttaaattcgagaaagcacacaagcaatgacctcgactatatgaatatggtctgccctaattacaaaggagaaacattctatgaaaaggggcctgcagtatctgatgaaaatttggttactgcatcaggaattgctcctctggaatttgcggtagaagtattgaaaaaattagatgtatttgcaccagatacattgcgttcatggtataagctaaataagactcaaaagcctgaatatttctttgagctaatgaatacaataaatcgatagaaaacactttagcagttttttgtagtgctcctgaacttataggagcattttttatatgtgtctaggagctaaataaagaaatgcagaaacttttaaaaagaatatagattggtaagccttatttcgaatagaggttgatttgggttaaaactgttcttattaaggctcatttcatggtgctaaagattcatttggagaagactgtcttgatcagaaaagacccttccaatatattgaagtaaaagatatcgggaggaactcttttgaaaaagatgttgatgttagcttttacatttcttttggctttgactatccatgtaggggaagcttcggccgttatcgtgaaagatgaggagaaagtgagttttacaatgacagagaatgaaaaatggtttatgaagtctgatgacctaaattcaaaccattggacatctcactttgggtacagattcaccattttcgatactgaaggatgtacaattaacgcaagaatcatgcgaatgactttgtcaggatatgaaataaccgttagtgaaaaaaacttctcgggggatcattttgattttagtgcaactgatcgagttgagacgatgccttataagactcattatttgattttgacaaaagatccagattgcggagatgttaaagtaaaaggtctatacggttttcagtttgatcagccagaatggtaataaaaaagtatctggattctcaccagcctaaacgccagccaagctaatgtctacatgcagacattagcttttttcattgtttaataggctgtcgtcaggattctagaagactttctcgtaatagtcttctcctgtcacatgaagcccaaatgacaggggaaatgtatatcattcacactttccgtcgtgaaaatgtaaatgtattcataaaaatcccgcagcatatcagcagtgcgccgaggataatattgatggtgatctgttcgtgcaattgcagccatccaaagaatagggccaatacgggaacaaacattaatgccatggatgcttttgacgcttggatttgattgagcacccaaaaccatacgacaaaggtaaagccggtggaaagcaagccattaaacagcaatgaccacaccgcctgatatgtccactcggctgaagggaccgcctcaaatataaaggaaaacaccaataacatgacggctcccatcataaggtgccaggcattcatgtgaataatatcgatatgcttgaattgtagcttgctgaacacattcgcgattccccagctaagcgctgccacaagtacgcacagctccccaaataaagcgctttgatcgatattgagcatttcctttccaaatataaataacagtccgaagaggccgcagaccagtcccatcgttttatacacattcattttctcgtttaatgaaaaatggctgatcaccgtaacaaatataggcattgtatataccaaaacagaggttttccctgaatcgacaaactgcattccatacgtcaaaatccccatatagcccagccccatcaacaggctcatgatgatatagcttttgagatgttctttttgaattgaaagcttttttctttggatgaagagaatgagaaataaaggaactgctccgatgaacaggcgcaaacccgaaaataaaagcggggggatgtcatgaattcctactttcatcgcaacccaagtataaccccaaataagtgtgacagatatgattcccagcataacttttaccataatgaagccgcctttcttgttaaaatatcgtgctggtttctatcatatgttacatttatgtataactgaaatacatttttattattgggggtataaccaaatggttatgaacatgaaccatcttcacatatttgtaaaagttggggagaaattaaatattacagaagcggcaaaagaattgttcatctctcagccggcggtaagtaaagcgataaaaaacctggagagctcactgcagctcaaattattgatcagggataaacatcatggtttaatgctgactgacatcggaaaagaaatattgctgctggcgaggcaaatgaagggaattgaaagcaaaatatatcaagtagccaaccgggaaaacaagctgttaaacgggaaggtgaaaattggttcatttcctgcagtttcaacaaatatcatgccacaggcgattgcggcattcagatcaaactacccgctgatccgcatagaattgatcgaaggaacctctgaccaaataaaaggatgggttgaagatcggacggttgatatcgggatcgcagcatctccatttgaaccgtttgaaaatcagctattgtgtaacgactatatggtggccgtcatcccgccgcagcgtgacgaattaaaacttgaaaagcatgtcgaccttgaaacatatcaagatgacctcattttttgtaaaggcggtcatgaaatcgcgatgtcaaacgcattttcgcaatacaacatcgaattaaaggaaaacttaactgtgcaaaatgccgaaaccttgattaatatggtcaaaaataacttgggtatcggcatcatttcaaactttacactttcatccgtcccgcatcaattgattaaaaaggacatctttcctagggtcacacgcgatattggcgtcatcgcacattcatttgaagagataacgccggcggcgcatgagtttgtcaaagtgttgaaagcagttgtaatctgaatcagttatcgtgttgcgatgaaatttgaagaagatgaatactcaccggcagagttacataaaagaaaaaagcaaccatttgaacgttgcttttcactctatttgggagcttgtatgcgtatgctaagaaaaagattcatccatctctgcctttgtgggactctgctccttaacttgttttaatgatgctactataagaaagctaacaatcactagcaagagccatgaacttacctttccaaggtgtacgagactccatgtatcgatttggtttggatatttccaagctccaaaaaacgtagcgatattttccgctatccatataaaaaatccgatgagtataaaagaaagtgcgagcggcatacggtaacgagctccattcacctcgtatgtaacccatgtttgccaaaagacaatgatgacaagccctgataaccaccatcgaatgtctatagaaaaatggtgggtgaaaaaattcaaataaatcgctgcggcaagcggaacaactgcaaaaaaagacggccacttaaccagttcaaccttaagccttctccatgcctggcacaaataactggctacacttgcgtacataaagccgctatacaaaggtactccaaatattttggagtatccttcttctggataagaccaggagcccatatggactttaaaaagttccagagcaagcccaataaggtggaataatgtgatcacttttaattcatcccgtgtctcaagaccggaacgcaccatccacaattgcatgagaacgcagataatgagcagccagtcataccgcggcaagaagggcagtgggatgatttgcgtaatagccaaagaggcaaaaataacggcaggaaacaaacatgaaagggcttgttcccagccaaaatggacgatttgttttatggctctcatgatgtatgcctcctccatagttgtgttcttcgtgtatgaaagggacgcttagtatagcagctagatggatataagtttatgtccataagctcaccgccaatcactttatttttctgttgatccttcatattttttctttacgaatcctgtgtcttcatcacttcggtattccaatatatccccgggctgacattctaaagccttgcaaatcgcttctaaagttgataatcgaatagcctttgcttttccgttttttaatatcgaaagattagccatggtgatgccaactctctctgaaagctctgttacgctcattttcctcttagcaagcatcacatcaatgttgataataatcgccatgtcatcacctcagaccgttaagtcattttctgattttatatcaatcgcttcttttaacagtttttgaagaacagcagcaaagaccgcaatcaccattgaagcaaaaataataaccaatccgatcacaatgatacccggggcgtcgtctatctcggccatcagataaaagacaggcatgcctgctgcgtaaaagatactgatagtgactgcgcaatattttatattcttcaaagctcttacagacaaacccgagaaagctttgtttttgtcaatatagcttaaaagtttgaacgcttgataaagagcaaagtaaaaaggtatcgccgttacatacaaatagatgaaaacgagatattttatataagcgatatttggaaataattctgctgaatagttggctaccttaggcactaaaaaaatgcataaagcaagaattggaattccaataagaaccaaagctatctttaaaaaaattgtcgacattcgattcataacaagcacctcatttatttgttgtctaattgaatgtaacaaaaaatttatcgtttctcaataaaaaaatattgaaatggattgattttttgttgttataggagacccttttcatttttgacaagacaaaaaagcatccctcatcactgggagatgctgaactacttcaaacttgccgactgaatgaaccgtgtgcctcagtgagctcagggatcggtgtgaacataaagctaagctcttttatgaaggtttttatcaacgtctaaagattcaaacaaacgatgggaagaaatacatcaaaggataagcggctgttcatactaatgattgggaggtaaaccgacttatgatacaaattttgatcactggtctttttttattggctcagccgagtgagccgcaggacagtttaacggtcacacagcaaggacggacgattgccactgttaaccgtgaagactttacaatgcctcttcccggcactccaatggttgactatgaaaaatacagtaaattcatcaaacagcttgatcagaaagtgtaccgtgagccgataaatgctgtccttaacgatcatggaagcatcgtcccgggcagggttggctacaaactgtatcaacaggcgtttatggaaaagttttatgcgtatttttatgggcaaggtccctccaagatagaagtgccggaaatgaacatttatccgaaagttgacagcgagctgctagctcacatcagtacgcagcagcttggtcagtacgtgacgtattttaactcaagcaataaaagccgttcacacaatatttctctttctgcaaaagcaatcgacaatcacgttgttttccctaatgagacgttttcgtttaaccaagttgtgggaatgagaactcggaacaaaggatataaaagtgcacccattattgtaaaaggggagttgtctgaaggtgtaggaggaggaatttgtcaggtgtcctcaactctatttaatgcagtagatcgtgcaggactgcagatcgttcagcgctattctcatactagaagtgtaccatatgtaccgcccggacgggatgcgacggtaagctggggaggtcctgactttcgctttcaaaaccaatataaccaaccaatcttaattcgggcaaaaaggtatgggggaagtatgattattacgctatactcttctgatgtgattaacagcagattgagaaaaatccccaaagctccttctcggataccgaaagaaataaatgcagagcagtaaagacaaaacctcaggtaaggttttggttaagagagcttgtagattgctcaaaatcaattctttaaggagcggccagtgaaaggaaggagggataaatgaagtgaaaagggtattattttctgtaattgtttttacagcagttggatttacgttttgccaatcaaaagcgcatgccctgacttttacggtgttgcctattacacaaaaaacagaccagtggtcagtaaaagtaagtgaagcaaaaaatgtaaaggaatttacgagacctcataaaggagaatatcaagtatattccttggaagtcaaaaatataggggaaaaagcagctacagtggatgtgcaattgtatagaaatgaccctaattcaatcacaaggttttcgctttttggatgtcccgatgaaaattgtgtcaaaccaaaagaagattctaaaatgttagctgaaagtttaaatgatggctcaccgctgaagttcaatcattttatgctggcagataaggcctctgaattagaggttgttataatttggacacagaaggggcaagaaggacgcaatttaaaacagacctttaaattcactgaagatggcgttaattagacagtaaagatggaatggctttgatgattcgatctcttactttgcctgaggaaaaaacgaaaaattgttggaaaaccaatcatagctgagtcaaatgtcaaagtgactgtgattaatgactatagagaagaaccagaggaggccttttggatactttatccgatgggagtgaaatgtttgtcgatgatcacaaagtctttattgaatacgaatagagactttgtgactgactgcgcatttcaacttaacattttactgataatgacagtgaaacctaaacaagtgcaacctgtttcatcattaaaaaccgctaatttcaaaattttctatgtcaagatttagttttttcaattgtttcaacaaaacttcaaattttaagcaattgccatttttcaattcttctggaatatcttccggatgagcaattaccatcccgctctcaagccattgtttgcgatacaattgaaatgcagcctcaattaaatgatcaggagttacaataaaacctaacctcacatcatgatcctcactgtagccaaattcaaaaccgcaacatggacaaatgtcaaacgttttttgatactcgcctttatacaaaggattttgaattaatcctttgtatccgcaaattaaacaagaataacatttttccaccaagtttaattccccttttatcacttatttactattgctgtcccgtaacaaatattacttcaaataaaaaacttcgtgtactgtatttatagcataagcagtgcatctaatcctcaaagatgaacacactttggatttgaaatgggtgatataggaatcaagataatatctgaataaaagaagggttttacagttaattggcaaaatggaaaagaaaaagtatttaagttggaacgggtatttattctattaggcatgtaaagtgtgaagttgaattccatgtaattatgttaaaggggggaaagaggagatgtgctacattgaaatcacaaaggacaatattgaagacaatcatatttgctgtgcattaagcacgaaacaatatgagcatgcagttaatgaaaagaagagatggctcaaagctcgaatggatgaaggattggtgttctatcgcttacatgaacgggcaaaagtctttattgaatacctacctgcgaatgaggcatgggtgcctatcaatgcgcctaattttatgtacattaattgtctgtgggtgtctggcagatataaaaataacggtcatgcgaaacgattgttggacaaatgtatagcagatgcgaaagcgtgcggcatggatggcattatccatatcgcaggcaagaaaaaactgccctatttaagtgataagcatttctttgagcatatggggtttactctacaagatgaagctgccccttattttcaattaatggctttgacttggaatggccttgcagattctcctgcatttaagagccaggtgaaaagtgattctatcaatgaaaaggggattacgatatactatacagctcagtgtccgtttgcagtgggcatgataaatgatttgcgggaattgactgaaaagaaaggggttcaatttcagtcaattcagttatcatcgaaagaagaggcacaaaagtcaccagctatttggacaacttttagcgttttttttgatgggagatttgtgactcacgagatcatgagtataaataaatttgaaaagttacttaatacactagcttgatttttaataataaaaagccattttaaggttcttgactcaatgaaacaaaaaatgcatttaagagctgttatacgttttaatcttgtctttagaaagcactttaatttaagtcaaaagtttagacagtcatctgttagatcattagccctttcttattttcttttcggtaacattttgatcgtattttcctactaaaaagttaggaaagtgaggaaaaacatgagaaaaaagaacaatattaagaaatggctattgatcattgctggattcttgatcatctgcatcatcacattatttgtaatggtgtcagggaacaaagtgaaatatgagggcagcgggaaaagcggactgtggatgtctaaccttgaaaaatcagacaaaacttcaattggacccaattattttctaaatctatattggcaggggagtaagaaggaagaaaagtggactgttgttgaaagaattactctgtatgtagatggcgaaaagtatcaagatgataacgtagatgagtacgacttatcggagtacacaggtgatgaaatgccgggtgggggacgcatggaggaccatatttccacctttgattatatgcctgaagatgaagtgataggtcatgatgtattagtaaaagtggagtggaggacaggccagaaaaaacagacagaagcaatcaaattacataagaagccatggtataaaaaatagtttatttgatgtatttgtgatcacattggtggtcacttttttatttgcggattcctaggcacagcaatctaagattctgcataggctgaaataaaatcttgttcatttctaaaacgaggtgcatgctgttggaacaacaaccaatcaatcatgaagacagaaacgtgccgcagcctattcgaagtgatggagctggagctattgatacaggcccgcgaaatataatacgggatattcaaaatccgaatatatttgttccgcctgttacagatgagggtatgattcctaacttgagattttcattctcagacgctcccatgaaattagatcacggcggctggtcaagagaaatcaccgtaagacagcttccgatttcgactgcgattgcaggtgtaaacatgagcttaactgcgggaggcgtccgcgagcttcattggcataagcaagcggagtgggcttatatgcttttgggacgggcacgtatcaccgctgttgaccaagacggacgaaatttcattgctgatgttggtcccggcgacctttggtacttcccggcaggaattccgcattccatacagggattggaacactgcgagtttctgctcgttttcgatgatgggaacttttctgagttttcaacgttaaccatttcagattggcttgcacacacaccaaaagatgttctgtctgcaaatttcggtgtcccggagaatgctttcaactctcttccgtctgagcaagtctatatctaccaagggaatgtgccgggatcagtcgccagtgaagacattcagtcaccatatggaaaagtccccatgacctttaaacacgagctgttaaatcaacccccaattcaaatgccaggggggagtgtacgaattgtggattcttctaacttcccaatttcaaaaacgatagccgctgcacttgttcagattgagcctggcgcgatgagagagcttcattggcatcccaatagcgatgagtggcaatattatctaacaggacagggacgaatgacggtatttatcggaaatgggactgcccgcacatttgattatagagcaggcgacgttggatacgtgccttctaatgccggacactatatacaaaacactggtacagaaacattatggtttttagaaatgttcaaaagtaaccgctatgcagatgtgtcactcaatcagtggatggcattgacgcctaaagaattagtacaaagcaacttgaatgctggatcagtcatgcttgattctctgcgcaagaagaaagtgcctgttgtgaaatatcccggtacgtaaagacgtaacagatcacacagctgcccttcatatctttttaaagtagatagagctgaattttggcctgtgttttattaaatccctatatatacgttatgtagggtttttctgcttgaatcgtattgtaatgagctttaaaatgttaatgtggaaatgaaatggtaaccattcgataatggggattcaatggccgatttctaccagtttgattggctttaaaggaggagaagaaatgaaagcactcatatttttatccagtttgactgccattgggagctctatattggggcgatggttagggatgctggatgattcttatgctgttggcgatgcttggtttataggtgttttagctggattgatttcacttctaatattgattgacagtcaaacgatgacaaagaattacatagtaagtttaagtacgatactaggcattcttggagtgggatttatatattttccagctgcattcatcaacatattattaagtattacactggataaacaaaagaaagaagaccttcatgtaagatgaaagaaatttcatttaattcttaggagggaaagtgtatggatttacctctatgggcttatatcatatttgcaatccacaggtgcggcaggtttcataagtttaatgtggttcagtttttttgctgacaaaatagaaaagtgaagcgattttataaaaatgtaaactattttatatgaaaggaataacattgcttatttaagtttacataataaaattatttcaaactgatgctaaagataactaattgatctatgtactaaatattcataattactagagggattggcacctaaggaacaaagctatttgacaagttcttgctagagaattttttcaatcactacatatgattttctgcatcaagaagctcagctgaattatttttgggtgaatttactaatgatgaaacctggtatgcttccatgtcatcagcatcataaggcagcagcaaactttgcagataatcagggcttgtatttttggggttaagccactccttttcatgatcatgggccaatataaccggcattcggtcgtgtatatctttcatgaactcattaggctcagttgttatgatggtgcaggtataaagagggtatccttgatgtgtgctccacttttcatataagccagcaaacgcaaaaagagcagatgatttcaatttgatccgcattgggattttggttttggaatcaagccgtttccattcataaaaactgtctgctggtatgatgcagcgtttgctgacaagcggtcttcgaaaggccggtttctcggtaattgtttcggctcgagcattgatcattttataaccgatcttttcatcttttgcccaaggtggaataagtccccatctaagcttgcctaagcgattatttgatccatcattgatgattgcaaggatgttttgtgatggtgcgacattatagcttggctggtattcacctttaggaaaaaattgatcgatgtcaaactggtcaataatatcatcaaatgcagagtacaaagtaaacctgccgcacatatccatcatcctttttaggggtttttaagtagtttgtgggacgatcgttcatttaatacaggttcagaacaatgatttcttttcacttgcgataaactggtataataagaaagccagttaagaagttattgtggaaaagaacatatgctttttagtttgaccgacgctggatcttgatggaattacaaggatcgcttaaaaatagcctatagtataaaaagaggcacagcgtttttaacgcagggcctcttttatatcagtagccaaataccagagttgtactttgtgatccggcatatttcgtgacaaattcttttgtatattccggcgtttggacacgatagctatagtttgacccaggattccaagaagtcagcggagaggtttgcttgttgagtgatggatagctgcctatgtctttgaaataaccagtgcccttgtcgtcaaggatgccgcctttttcactgcctttcccaaagtaattatattcggaatatatttttgcttttgtagcaattgtaatcgcctggttaaaattattgctgtaattgtttttaacatgaaagtaaccgtatctcatcagacctgggcctctaacatacaagttctcaaaataattattggcgattgtcatgtgggggtagccgtcatattgatgctgagaatcatccgggtatcctaaaatcaaaccgtatttatgattcgcaaattttgagttgctgatcgtgatataatctgcggattttccgatatacacgagtttgtccaaatcgcttccgcttgcattatagctatgacctgagaatgtgacgtgatcaatccaatagttcataccggaatctaaataaagctggatatcattatttccgttaatctgcggactgtgttcaaacgttaaattttgaaaaatgacatttccaaaagctgatgaagttgttaaataaatatttttcagcgtttttttcgcgtaagagcccacgagtgttttatttgagccaatggtaactgttgttttcgcagatgcggaaagatcattttgaagcactaaaattttcggagtggatcctcctagatgggtttttaaatcatttacgctttgaatgtaaacaatctgcccgttttttccacccgttgtgcccgttttagagatgcctttttcatttttggcatttccggcaaaacctaaaaggccatttgttgaggtattcggaaaatcgactgcacctaatgcttttccaggcaagagaaccaaaaacaagctaaagacggtgaaccataaacaaagtcgtttcatcacaatatgcttcctttcaattttaatcatttccttgcggggattattattacagttaatggaaaggaataataggttctatcttcctaattaatgttgggttacttaaaaaatagagattgcgccaaaagacatactaacaattgaaatagaagaaaggattgatacaccgttgactgcagcagcttatcgaaacaccttgctatcacttttatgtttaacagctggaatcgtggatgtaatcgggtatttaagcctgggacatgtgttcacagctaatatgactggaaacattgtattattggggttagctatcggcaaatccattcaggtcactgtttttaattccttgactgcgctaatcggatttatatgcggcgtgatcattgctacattgatggtcggaaaggcggaaaataccctttggccttctgctgtgacaaaagccctcgcacttgaagcattcattttgtttgtctttgcttgtctttctttttaccgggcatttgttcctgtgcacattctaattatactcatgagcatttctatggggattcaaactacagcagcaaaaaaactggggattgcaggtatttcttcaactgtgttgaccggcactttggcttctcttttagaggatatatccggccgtttgttttttaagaagcaaaagaagactttcttaagagatactgtgttaagagcactggctattattttgtattgtgtaggggctattattgttgctctggctgagcctgatttttatcacttcattatttgggttccgattgtgctgatctttggcatcatgatgacagctaagttgaaactgagcggggaaaaatagcttttcctgtatagctgttatcaggccaacagcctgtttcatttcgttattgaaatgcgaattttgagagggaaaaataagacattcggctgaagtgcacattcgttcatttgtattggctttttcataagtacctacatttgatatatgaatgatagtgaatttgccttaaaatcaactatgaatctatttcctctttcaaaccagatggattgagtcttataatgataatgattctcatttgaagtctggtttgaggaggaccaaatatgaaaaagatcatgagtgcatttgttggtatggttttgttgacgatcttctgtttttccccgcaagcttcggcagcatatgacgacctgcatgaaggttatgcaacgtatacagggtcaggctattcaggaggagctttcctgctggatcccattccttccgatatggagattactgcaataaatccggcggatctcaattacggaggagtaaaagcggcacttgccggctcttatttggaagttgaagggccaaaagggaaaacaaccgtatatgttactgatctttatcccgaaggcgctcggggagctcttgatctgtcacctaatgccttccgtaaaatcggcaatatgaaagacggaaaaatcaatattaaatggcgtgttgtcaaagccccaatcaccggcaatttcacgtaccggatcaaagaaggcagcagcaggtggtgggcagcaatccaagtcagaaatcacaagtatcctgttatgaaaatggaatatgaaaaggatggtaagtggatcaacatggagaaaatggactataaccattttgtgagtacgaatttaggtactggctctctcaaagtcagaatgactgacatccgcggaaaagttgtgaaagacaccattccaaagctgcctgaaagcggaacgtccaaagcctatacagtaccgggccatgttcagtttcctgaataaaaaatacgaaacagcggatcttttcccgctgttttttcaatgttctgtatctgcatgtaaaaatgttttaatcatgttcaactgctcctgctttggataactggtatacagcctgcttgaaatccgaataggatctccgaaaaaatatctttcgtagtgagtttgtctagttccgaatgaactcattgttaaatcccatgccaaacggaaaattttcacacgttcttcagcatttgtattggttgcttgaagatattggtcaagatcttcccgtatctctgagtcaaatgcattttcggtaggcagtgtcaccattccgctagctccaattaattgtatgatttcagtaaatcgaggatatagcttaggaatgatcgtactgatgacttgaagaggaattaaacaggggcgcatatagccgaattcatctaactgagcatcattttccgatttgtcaatgagggctttgattgtttccaatcccacaatgatttctgagagcttttcttggatgtgctgatattcggaaacattaatggtgtcgacaagaagctgtgcaacacctaatagaaattcaatttttatcatttgcctaatgacaacctggtgaaaggtaaaggcatgaaaagagctttttgtcataaaatctttagctgcttccacattatcgtaaaaaaacacacgattccacggcactaacacatgatcaaaaaccacaattgaatccatttcttcataccttgagcttaagggatgattaaaggaagagtcgcttaatacaaatgattctcttgtgatgaattttacgccttttgtattagaagggattgaaaaagcataagcttcatctgtttcaaagaaaaatttaggcgctgaaaaaaccaagatttcatcggtcaacccgccttgtgtggcaagcagtcgtgcgccatgaatcattaaacctttttcggttctatcaatgactttagcagatatcggtttttcacttagcccaaaataggactgtgaccggttcacttgcggagtaatgaatgtatgggtaaaggaaaggtcatgcttagcagcttgttcatacatatctagtatatgttcaggaaagcaattctctttatcttttagaagctccgctgacgaagcaaagctcatcataaccgtattcatgtaatccggacttctccccatcattccatgagtatgtctagcccaatgttcaatcatggtccttctttttttcaaatcattttttgttttaggctggagataggaaaggccgattcgattatgatctccaggaaggcaataagtcatttcatgtattaactcatcctttgtttgcaattcataaagtgagctttttgttttgattattcctttaaatgcaggatgctcagaaatgttaccctttattttttcgccatcataccatatttcgttttctagtttattcaatcggtcaatgaattctttaccattgatgatccccatttaagtttcgctccttcatattatgctgcgtattgtattatattttcgagaaaacagccggttcagccaatttgaggtgggaaaagccttttttagaaaaacgaataagagtgacttacataccgcaaaagactgcaaattttacttaaggtttttctgtaagttcagagacgtaaagaatttgcttattcatataagaatatcactataaaacttgataacacgtgtcgatattatggacatgagcgtaagcgaattggattcaaacgcgcttgaacatattttatttcagccattacattgtgcggaaagggaaaacgacacatgaaagtgaaaacaaaattgctggggattatatcaatattagttgtttcaattattggaattggaggctcctcagtatttatgatttcttctactgtgaaaaagaatgaagaacttaaagacaaaatggaattccaaaaagagataaaacacatccaatatgaattgaccgggttatcaaatgatgaaagaggcttcttgattaccagagacaaagaatacgacgagggtatgaagggaaaagcagacgatgtcttaaagagccttgaccgggttaatgacttgattgatgaagagaagtatcaatccaatattgaagacattaagacaagttttactcagtatagagctttgaatcagcaagtagtaacagcctactcttcaaatcctaaaaaagcagaaaccatccattttggagaagaaagaacaataagaaaagaaggcgtagctccggctgtcaataagctgtctgatcgcctggatcaagaggtagaggatctaaaggatgaaatacagggcaatgggaaaatgagtcaatcgctcattatcattgtcacagggatatcagtaatattaggcattgttctaagcataatgctgttaaagtccattatggtgccactaagaagcataaataagcagctggaggaaattgcacacggcgaggctgatttaaccaaaaaagtcattgtgaaaaataaagatgaatttggccagcttgcccaatcttttaattcttttactcattcattaactcaaattgtgaagcagatcagcagctcatctgaacaagtcgccgcttcctctgaagaattatcggcaagcgcggaagaatcgaaatcaacatctgaacatatttcacgagccatgcagatggctgccgacagcaatgtgaagcaaagctcaatgacagaaaagagcgcagaatccatcactgaattattagacagtatatcatcagtcgcttcaaatacagggaacatagcggatctttcttcttcgatgagagacaaggctgaaataggctctaagtccgtcaacaagatgttagaccagatgaaattcattgataaatctgtagattcagccggcaatggattgcaaacattggtagcgagcacagcagaaatcagcgatatctcttcgcttatcacgacgatttcagagcagacaaatttgttggcactaaatgcagcgatcgaggcggccagagccggagagcaaggaaaaggatttgctgtggtggcagaagaagttcggaagttggcggatgaaacaaataaatctgcaaaccacatccaatcggtggtagcgaccatccaaaacgaatcgatagaaacggtaaataatattaaagttgttcaagaaaatgtgagctcaggtattgttctttctcaagagacaacaggaaatttcaatgaaatactgaacctggtggaacaggtcacttctcaaatacaagaagttgcagcagcaactcaacagcttacttcaggcgttgaagtgattcagcacacagttcatacattggctgctggtacaaaagaaacgtcagcaaatacagaagcggttgcaaattcatcacaggaacagcttcattcaatgggggaaatctcctatgccgcagaatctctatctcagttggcagaagaacttcaaaccgtcattaatcgttttaaatattaaacaggctacttacgtgcaacccccatcttattcggtgggggttggctacttttactgtggttgtttctaaaaacagagttaactgacttcttttaagttagttccgtttgtatggctagtccaaattttgatcgattgtcccttcaaaatagtcatcgctgacctgttcatgagtttcagccaatcctttttctaattgcgtgcttcctttataatctgagggctcaaagtatttcccggcaacatctgttgtgtcatttttgttttctttgttatgagtttgtgtttcagtgtttacactttctgtctcagtattgctgcgtatagattgctgaaaatcatattccttgtctaatgaagaaaatcttttataatcatcaggtctgtctgcaccgtttttttgagtcactttacttcctccagattattgatattttagtgggggtaagaacttatttcgttcttttaggatcggaaccgtgttttttaggatcatctgctttaaaagctgtttcagtctcatggtcatttcttatttgttcaatacttgaattttgaatacctttcttactcattggtttcacccctttacgaaaagtgttgaaatatcaactcttcttattctgtctgttgggcaggtattcatgcacttttttcattcgcgctttggccaatcaggagaggcgttttcagccagcgtattatctaataaaagaacgtcatttttgaaaccttttattagcgcattgcgtatagcacgttagggaagacatctcgataaaagaaatacaaaggttgtgaatttatactaacagcactgtgaataaatcaaacaaggggggtgaaaaaatgaaaaaaatcgcatcatattatttaatgacattagggctatccagccttacatttggtttgttattagggttttattctttcgttatgtatggcgatatgataattgcattgtttacggcagcaattgctttattatacggttttgtggtgtatggcctttttgctgttccgctccaaatgaagttgcagaaaaaagcgagaactttcaatgtcatgtacctattgatttacagtgtggttgcttttatcgcagctttcctgttttttgttatcaatgaacctgcgtcaatagcatggacattgcaatcgtacttttattatatgttaagtattgcggctgcagtgatttactggttatgggattctctgatcctttataaacgtacagcttccggtgtataggctaatttttaccaatcggagaaatatggaggttcaataaaaattcaggatctaaaagctttaggtttcatatttttttaaaaaaatcctccgcggataaaggcgcagtatgggggcataatgagagcacacattcaaaccgaataggttttctaagtgttttacgatacatacgttcatcaagaacatcacgtcatcaaaggaatataaaaactattgttgtggaacgggcatcttgagttgtttgaggaaagaacatagatggtggtttatcgttttatcagcgcttatagcacaaagttttggtggcaggatccatacagctaaacagaggagagcgtgacaatgaatctcgctctcctcagatttgttttattcaccctgatgtttttcaactaatgtgaatgtccaatcttttaacatatgtttctggacatatttttttccgtttatttcgatgtaaggcaggtctgccatgtctccagctaactgttttgcttcagtcgttgttattcctaaaaaaagtccaatgtaaaagtaaatatcccgttcttttattaggaagatatcattttgttcattacctttggtttggttcctctgctttaagccttcaccgataaaatatccagccaaagcaataccaattcctaaaaaaacgtccatgtgtatgcctccattatgtcgatgttatgttatacgggcttggcatactccgggtttcattatttttcaaaccttttcaatctgtacacggcctgaaaaaaaggtggcgccgccgcccatatcggacaagcgatctggggttagcgcgtttacaagctgtttttttccttgttcatccgcccataatccttggctgacaacgacacctggcagcacttgttctccaactgcagcggtcagctcgcattctccccggctgttccaaattcgtacaggtgccccatcaacgattccgtgtttttcagcatcttttgtgttgataaagagctttggcgtcttttcaagcttgatgtgtttttcattattggaaaatgttgagtttaagaaattatggtttggccccggaacatacataaacggatgttcattatcggttacaagaggtgtatatgtcggtaaagcagggaagccgtcttgtttcattttttctgaatataattctatttttccgcttggcgttggaagttcgcccggaaacagcggcttttcacgtttcgctttcataaatgaatgcttagtaagtgaatcgtaatcaatctctgccaaatgcggattatctggatggtcaagcgcctggcggattaatacttcatctgaatctttaagctcctggtctgtgaatcccatggcttcagccagtaatcggaaaacctcagtgttagacttgctttccccatatctctcaatcaccggctgctgaagctgaatgtaatggtgccagtaggaggtgtaaaaatcagtattttcaaaagcggatgttgcaggcagtacaatgtccgcatatgcagccgtttccgttaaaaacaaatcatgaaccacagtaaacaagtcttcccgcagcaagccctgtctgactttgtttgcttcgggcgcgacgacggcagggttcgttccgtaaataaatagagagcgaatcggcgggtctgtttccaaaagcaccctgccaagctgattcatattaaacgacctcggggtgcgccctttcaataagtcgggccgctgcaaggcatttgtgttatattctaaaattccgctgttatgcttaattgcgccgccccctgtgtgcagccattggccggtgatcgccggaagacaggcaatcgtccttacaatcatccccccgttatcgtgatgctggggtccgtttccgattctgataaaagaaggggaggtttccccgtacatttttgccagtcggtaaatatcttcggtactgacaccggtgatcgtcgataccttttcaggatcatattgtttcacgtgttcacggagctcttcatagccaaccgtgtactcggacagaaatgcttcatcatgaaggttttctttaaataaaatgtgcatgatgccaagagcaagtgcactgtcggttcccggttttattgggataaaccaatctgcaagacgtcctgtttgatttttatgcacatcgatcacgacaattttggcacctttttttcgcgctttttgggcgatcgtaatttggtgcatatttgtgctgaccgcgttgattccccaaaaaataaatagttttgtatgaacggtttcctcaggatcgattcccgcgcttatgcccattgtatatttatagccttcagatcccgctttgctgcaaatcgtccgttcaagctggcttgaccccatgcggtaaaaaaagcggcggtccattccttcagctgtcaatttccccatatttccgtaaaagctgtaaggaagtatgctttcagctccctcttcatcaatcagctgtttccagcgggaggtgatcgtatcgattgcctctttccaggaaatcggttcaaatatcgcttggcctttcgcacctgttcgtttgagcggtgtagtcagccgcttttcatcatagatgcgctccgtcatattccggactttgttgcatatgtttccagctgtgacaggatgatcagggtctccttgcacttttacgattttcccgtcttttttatgtattaacaatccgcactgatccgggcagtccagcgagcaaacggatttgaaaatgccgttttgttgtgtggcaaaagatctcatggcccagttcctctctctagttagatattttgtaagaattataacatttccgatgataacgtcaattctgaaaaaaagagattgacatcaatctgagtcttctttatgataaacgtattcttcattctgaaaattacatactcaatattttctatccagagaggtggagggactggccctatgaaacctcggcaacattattgtgccaattccagcaagcgctagcttgaaagataggaaagcaaggtttataccggcgtctgcctgtaacagagcgcgcctatatatgaatctctttccatcttcggaaagagattttttttatgaaaaatacgatgaaaaggatgttttgcagcatgacggttttggttacagcaccgtacaacgaagaaggacgaaaagagcttgaaaacttgtttggctcagttgcttatcaatcttggaaggaacaaggtagggcatatcgggaggatgaactcattcagctgctaaaagcaacaaatgcgacaggcttgattactgaacttgatcaggtaacagacagcgtatttgcttctgttcccgaactttcatttgtcggtgtttgcaggggaatgccctcaaatgtggatgtggcagctgcctcaaaaaggggcatacctgttttttatacaccagggcggaatgcacaagccgttgccgaaatgtttattggaaatgtgatttcctttctgcgccataccagcgcctcgaatcagtggctgaaggatggagagtgggacagtgattacctgcaggcttatgtcaaatttaaaggaaatgagctaacaggaaaaacggttggcatgattgggttcggcgcagtcgggcaaaggattgcaaaactgctgactgcgtttgactgtaagataaaatattacgatccatacattcaagacgatcatccgttgtatgaaaaagcatctcttaaaacggtgttttcagacagcgatatcgtttctgtccatctgcctcgcactgaggaaacactcggactgatagatcggcaatattttgatctgatgaaagagagtgcgattttcgttaatacttcaagagcagttgttgtaaaccgtgaagatcttttatttgtattaaaagaacataaaatcagcggtgcgatactagacgttttttatcatgaacctccagaggaatcagattatgaattgatttcattgcctaatgttctggcaacaccgcatctcgctggagcaacatttgaagtggaggatcatcacgtgacgatactgaataaagccctcaaaaagtggaagggtgaaaaaactcttaatattcagacaatgtataacaaggacgcactgaaaacagggggataagaaaggaggctaacagaatgaaaaaacaaaaaggctatctcgtttttgatattggcacaggcaatgcgagggtagcggtcgtgagtgtaactggcagtgttctaacagttgaacgggaggacatcgagtattccacagagacgctttacccggacagccgttatttttctcctcaggtgctgtggaagcaggtgatgaatttggcaaaacgtgcgctatcccgttcgtgtgatattgacatcattggtttgacatcgacgagccaaagacaggggattgttttgattgatcaaaacggcaatccttttctcgggctgccgaacatcgataatcgcggccgagagtgggaggcgggcattcccgattgggaagagatatacagcagcacaggccgcctgccaactgcacttttttctgcgctcaagctttatggattaaaacagcgccagccctctttatgggaaaagactgcaagctttacaagcatcagtgattgggtgacgtaccaactgagcggaatattaacatatgaaccatcacaggcaacagaaaccctgctatttgatgtgaagcaaaacacttggtcagaagagatgtgcgacattttcggcttttctccatctatccttccgcctcttgtaagagcgggaacagcaattggaacgatagcaaatgaatatgcatccgaattaggcctttcaataaatgctaaggttatagcagggggcggggatacacagctggctgtcaaaagcaccggagctggacttgaggacattgtcattgtatcagggacaacaacgccaataaccaaaattactgaggatcatggcgacacaaaacataaagcctggttgaactgtcatacggatcaagggcattggcttgtggaaacgaatccgggaattaccggcttgaattatcaaaaattaaaacagattttttatccgaatgaaacgtacgaagtaatggaggaggagatttctgcacttgcaaaagaagaccatgcatgtgtagcggctctcggctcttatttatcggctgaaaagaatgcgttaacgagaggcggttttctttttgatgccccgctgtcagcacatttaaagagggcacattttgtacgtgcagcgctagaagagatcgcattttcaatcaaatggaactttgacattttaacagaggttactccgtttgaacgtgattatgtttgggtgtgcggagggggattccaaagcaaagcgctcactcaatatatcgcggatcttcttcaaaaaaaggtctatgtccaagagggatatcatcaggcatctgtcgtcggtgctgcagtcatttgcaatgaaacctttcaattaacggaggagatgtcagcaaatgtccgggtgatcgaaccgaaggactgtcagatagaattggctttatatgaggaatggaagcaaacacagcgctttttttcaggatcagaaagcaaagtattaatttaagacggaatttctgctgttttgaggaatcatttaattttcaactttaataaggtaatacggtaatgaataatagcatctaaggaggagacagatatgttggataaaataggaataccgaagcggcttgcctggggatttttaggggttgttttgtttatgatgggagatggccttgaacaaggctggctcagtccttttttgatcgaaaacgggctcaccgttcagcagtccgcttccatttttagtatatacggaattgcgcttgccatagcttcctggttttcgggtgtatgtctcgaagcatttggcgcaaaacgaacgatgtttatggggctgttgttttatgtgatcggtacagctgcttttatcgtatttggatttgaacagctgaacctgccagtgatgtatgtgacttacttcgtaaaagggttaggttacccgctttttgcttattctttcttgacatgggtcatttacagaacaccgcaaagcaaactgagcactgctgtcggctggttttggattgcatattgcctcggcatgtttgtgttcggcgcttggtactcaagctacgcgatcaaagcgttcggttatttgaatacgctttggagctctattttctgggtatgtctcggtgcattctttgcattgtttatcaataaagaccgttttgaaaagaagaaaagaaaaagatcagaaacagccgaggagcttttaaaaggggttacgattctatttacaaatccgcgcgtgcttacaggcggaatcatcagaatcatcaacagcattggtacatatggttttccagtctttttgccgatgcacatggcccagcatggaatttcaaccaatgtgtggctgcaaatttggggaacgattttcctggggaacattgtgtttaaccttatcttcggtattgtcggcgataaattcggctggaaaaatactgttatttggttcggcggagtcggctgcggcattttcaccgtcttattatactacgcacctgttttctccggcggaagtttagcggttgtcagcgtgatcggctttatttggggcggtttgctggcaggctatgtgccgattggtgcaattgtgccgacggtggcaggaaaagataaaggggcagccatgtctgtattgaatttagctgcaggtttatcagcgtttgtcggccctgcactcgcttggctgttcatcggtctcgtcggcgcgcaaggtgtcgtctggatctttgcggccctttaccttgcaagtgcggtcttgacaaaatgtattcatatacctgaggaaaaagcagttaaggaggaaacatctcctcaatatgcatcttaattagaaagcgccctgtttgaggggcgctttttatctttttaaaggaaaagggatgtggcacagaccaagagaataccgtcattctcttggtttcacaatagagtacacatttgtatcatatggagtcccattttgatacatgtactgtcttaaaacgccttctttttgaaaccccatttttagaagcagacgatttgatgcttcattatcggtaaatacaactgcgccaatacgcgacagtccaagggcagaaaatccgtaagatacgacctttgaaatgacttctgatgcaaatccgtttcgccaatgctccgggatgatttcataaccgatttccgcgcgcctatgcttttgggccagagcgtgaaagccaattgttccgatcagttctttagtgtcccgtctttcaattccccaccgtataccgcgtttttcttgatagagggcagcaaacgtttgaatcattgaaatggcctgttctatagattccatgttttcaagcccataatagcgtgtcacctcatcgtttgagaaacaagcaaaaatggcttccgcatcctgatctgtgatttgcctaagtataagccgatccgtttctaatataggaaacattcaaccactccccacgtttgtgtttttgtttatcatatcccttttatttcctcttttctatagcgaaatcaaccaatgcagcaaaggaacgaatttgtctttctagttgctctttgtttttgctgaattgtttcaaacgatggccgttcgcgcctgatggatggggaaagccgttaaggcaaatcaaattctggaggctgtgctgtctgatcaatgtttcacacactgtttcggccgcttttcctaacggaatgagaagagctggtcccgtcacatggttaagctctgcagggaagtgcccaaaagcataagtgcttaggataggagaatgagtgatagccggtttgtatccggtatagtttttttgctggataaagacaggatatttaataacggaagttgtatggagcatatgccgtaattctccaaaaagctttgcggcgctttgaatgccaaaagcttgcggcagcccgcataaatccagcatggtaataaggttatgtctcatcgatccggagaaacccgctgctatttttgtgtctactgccatttgctcaagagtcccgccttgcagcaggctttcggcggctgtttcgtacgctgtcttcatctgggaaaaaccaggcgtgatcccggcaatcacaagcgaggcatcccgattgataaattcattatgaggtgaatagtagatgccaagttcgttttcttgatggagacgaaatggatcagtaagtaaatcggactttgtaagtgaagagggaagaaaatgtactttttctgcgaactcttttaagcagctgcggtttataatcatgtgtaagcctcctcgaaaaatgagatcccatttgtccattctgatcgtaacaacgggatctcattcatccttatctgctattaaaatgtcctgcctgccacacctctttgactgcttggggaacttctttcacttcagctgcggtctgctgaagcgtgtatttttttatttggacatcctgctgaatcttcttttgtttttgcgtcagcagctctgtttctgtttttaatccttcgatttgtttttgcatagcctgcgtaacagaggaaagctcctttagtgcggggtctatttttttcttgttttggatcacggtaactcctaagaagataatagaaactgctaatactgcaagactgatataaactataatcatatgttcactccttttcttatgtcattaccctgtatccgtttttttaatcagaagaaatgatatttacacagttcgtttgatttgcgtattggatgtattgtacttataatgtgatatcgtacatatgtaaacaaagaaagggtgcttcaattgcaaagtttacaacataaaactgcactaatcacaggcggaggcagaggaattggccgcgctactgctctggcgcttgccaaagaaggcgtgaatatcgggttaattggccggacttccgctaatgtagaaaaagtggctgaagaagtcaaagcgcttggtgtaaaagctgcatttgctgctgcagatgtaaaagatgccgatcaggttaaccaagctgtagctcaagtgaaggaacagctcggtgatatcgatatcctcattaataatgccggcatcagcaaatttggcggtttcttagatctgtcagctgatgagtgggaaaatattattcaagtcaacctaatgggtgtgtaccatgtcactcgcgcggtgcttccggaaatgatcgaacgcaaagccggagacatcattaatatttcatctacagcgggccaaagaggagctgctgtaacaagtgcttacagcgcttctaaatttgccgttctcgggttaacagagtctcttatgcaagaagtgagaaaacataatatcagagtcagcgcgttaacgccgagcactgtcgctagtgatatgtctatcgaattgaacttaacagacggtaatcctgaaaaagttatgcagcctgaggatcttgctgagtacatggtggcacaactgaaattagatcctcgtattttcatcaaaacagcgggattatggtcaacaaatccttaaaaatgaaaacctgtctttcgacaggtttttttatttgaatgaaatccgtaccggtaaaatgagatatgtaaaccctggcaatcgtttaaattgaagatagcagtaaatgcaggctataatagaactaagaaaactatgtaccaaatgttcagtcgaaatttattttttccgctacacctataatcagtaaacatgaaataactggactatcagtctttaatataaagaaggaaaacaataaaagaaaattgaatatttagtacatagtgttgtcagtgacagaagaaggagtgcatatgatgaaagaagaaaaaaggagttcaacaggctttttagtgaaacagcgcgcatttttgaagctttatatgataacgatgacagagcaagagagactctatgggttaaagctgcttgaagtacttcggtctgaatttaaagagattggttttaaaccaaatcatacagaagtataccggtctttgcatgagcttcttgatgacgggatactaaaacaaattaaagtaaaaaaagaaggggctaagctccaggaagtcgtcctctatcaatttaaagattacgaagctgccaagctatataaaaaacagctgaaggtagagctggatcgctgtaaaaaactgattgaaaaagctctctcagataatttttaatagaaacaaacacccggcgcagcagtgtgaaccgggtgttttctgcttttcattatacatatttgtcgaaaagaaacaatacaaatcaataatggccttcaaacttgacatcatttcctcacgtggtaacattttaaacgtgtgaaaatgcgaacaaaaaagcgaacaaaggagatgttaccgatctttgatcaaaagaaagtagcctttataggagcaggatctatggcggaaggaatgatatcaggtatcgttcgagccaacaaaatcccgaaacaaaacatctgcgttacaaaccgcagcaatacagagcgattaactgaacttgaacttcaatatggcattaaaggcgccttgccgaaccaactatgtattgaagacatggatgtgctcattttggcaatgaagccaaaagacgccgaaaacgctctgtcatcactaaaatcacgtattcaaccccatcaattaatattgtcggtccttgccggcataactacctcttttattgaacaatcattgcttaatgaacagccggttgtcagagtgatgcccaacacttccagtatgattggcgcttctgcaacagctattgcccttggcaaatatgtgtcggaagacctgaagaagctggccgaagcattgctcggatgcatgggcgaagtctatacaatccaagaaaatcaaatggatatattcaccggaattgcaggcagcggacccgcgtatttttattatttaatggaattcattgaaaagacaggcgaggaagcgggcctcgataaacagttatctcgaagcatcggcgcacagacacttttaggtgccgcaaaaatgctcatggaaacaggagaacatcctgagatcttaagagataatatcacgtcaccgaacggaacgacagcagcggggctgcaagccttgaaaaagagcggcggcggagaagcgatttctcaagcaataaagcatgcggctaagcgttcaaaggaaatcagcgaagatatcgaaaaaactgcagcgccgctatcaggagtgataaagtgacgcctgatacaagcatgaaaagagtcgttgtgaagattggaagcagttcattaacaagccttcatggagaaatcagcattcgaaaattagaagcgttggtcgaccaggtcgtcaaactcaaagacgccggttatgaagtgattttggtttcctcaggcgcagtggcggcgggatatcggaagctcggatttatccaaaggcccgagaagcttccagaaaaacaagcatcagcttcaatcggccagggattgctaatggaggcttattcaaagctgtttttggcacacggctatgtcgcatcccaaattttaattacgagaagcgatttttctgatgaatatcgatacaacaatgtcaggaatacaatgaatgtactgctcgagcgcggcatcatcccgatcataaacgaaaatgacacagttaccgtcaatcggctcaagtttggcgacaatgatacgctcgcagcaaaagtcgcaggattgattgatgcagatatgcttgtgattttatcagatatagacggattatatgacggcaatccgcgcacaaatccagaagcgaaaaagatacagcgggtgagtgaaataacacctgacatcgaagcatgcgcaggtgacactggaagcatcgttggcaccggcggcatgcgctctaagcttgatgcgtttaaaatcgtaatggcgtctggcattaaaggtttcctaggtcaggcagatgctggcgatattttataccacgccgttcatgaacaggcggaaggcacctattttgaagcagaaggaacgcttccgttgaatcaaaaggagcaatggatcgcttttaattccggtccggaaggtgaaatgattttatcagatgattgttcacgaaaaataacaaacggacaatcgagtttatacctagacggtgtacagaagattaaagggaaattcaaaagcggttcagttgttcggctgatggattcaaaagggacggaaatcggccttggaatcgtcaattactcttctgtacagcttcaagaaccggaaaagaaaaaggaactgacaaatagagctctaattgatcaagaagcatttgtttgccatgtggatttttctttacctgtaaattaatttgcagaaaaaaacccgaagcttctatatagaagctcgggttcattttttttattgatactgctccagcttagagaaaaattgaatgacaaactcataaaaatcattcgcggaaggcgcaagctctctatttttcggtttaatgattccgacagtccgttttacttgagggaactcaattggaattttcacagtaaaacgaggtgttgtttcagcaaaagtactttcaggcagaagggtaacgcccattcctgcggacactaaccctttgatcgcatccaaatcctcaccctccgtggaaacgagaggagcaaagcctgcttgtttgcaagtatcgattgccatctctctaagtacaaatccttccgggaacaatacaaattggtcgttgcgcaaatcgattaaatgaaccgttttttgtttagcaagcggatgatttaatggaacaagcgcgtaaattttttcagtaaataatatttttcccgttatgtcagagaaattcgtcggcaccggccctaataaggccagatcaatatcgcggtttctgacagcttcaatcagaaacttataggagccttggcgcagcaaaaattcgacgtgcggatattcttctttaaacgctgaaatgacagtcggcaaaagctggctggcgaggcttgtaggaaagccgatctttaccgttccgcgatgcgggtcaagatactcatcaatttgctctttcgcataatcaatggctttcatcgccgttttcacatgaattaaaaattcttttccgattggcgtgagtttgatatttctcccttcacgctcaaataaggtcacatttaattcttcttcaagattggcaatttgtctgctgattgctgattgggccacatgcaaatgatcagcggcttctgaaacgtgttctctttcagccacctccataaaataacgcagttggcgcagctccatgtttgtctcacatccatctatctcattttgagattcttttgatctaaattatatattgtttatatcgttttgaaaacctacaatgattatagagttgttagattttatgaccggtattatcggaaattgatcgggggagaggaattatgacgtacaatcaaatgccaaaagctcaaggtctctaccgtcctgaatttgaacatgatgcatgcggaatcggcctatatgcacacttaaagggcaagcagactcacgacattgtcaaacaaggacttaagatgctttgccagctagaccatagaggagggcaaggcagtgatccggatacaggagacggagccggcttactggttcaaatccctgatgctttctttagaaaagagtgcaaaaacatcaatctgccagaaaaagaacgttacggggtaggaatggtctttttctcacagaaggaagatgaaagaaaaaaaattgaaaagcaaatcaatgcactaattgaacaagaaggccaagtcgttcttggatggagaactgtacctgtaaatgtcggaaaaatcggaacagtggcgcaaaaaagctgtccgtttgtccgtcaggtatttatcggcgcaagttctgatctaaaggacaatttatcttttgaacgaaaattgtatgtcattcgtaaacaggctgaaaattggggagtaacggaaggtcttgatttttattttgccagtctttcaagccagaccattgtttacaaaggccttttaacacctgaacaggttgatgcattttattctgatctgcaagacgaagcattcgtttctgcttttgcgcttgttcattcacgcttcagtaccaatacattccctacatgggaaagagcgcatcctaaccgctatttggttcacaacggtgaaattaacacccttcgcggaaatatcaactggatgagagcacgtgagcagcaatttgtttctgaaagcttcggtgaggacttaaacaagattttgccgattctcaatgctgatggcagtgactcttccattttggataacgcatttgagttttttgtgatggctggacgcaaaccggcacatacggcaatgatgctcattccagagccttggacggaaaatacgcatatgtccaaggaaaaaagggcgttctacgagtaccatagctccctgatggagccttgggacggaccgacagctatttcatttactgacggtaaacaaatcggggcgatccttgaccggaacggtctccgtccggcccgttattatgtcacaaaagatgattatattattttctcatctgaagtaggcgttattgaagttgaacaggagaacgttttatataaaaaccgccttgagcctgggaaaatgcttttaatcgacctggaagaaggccgtattatctccgatgaggaagtcaaaacacaaattgcaactgagtatccgtaccaaaaatggcttgaagaagagcttgtacaagtaaatcctgatccggagtcaagagaagaagaacaatttagtgatcttcttactcgccagaaggcattcggatacacatatgaggatatccaaaagtatctaattcctgttattaaagaaggcaaagatccccttggttcaatggggaatgacgctccgcttgctgtactttctgaccgagcgcaatcgctgtttaactactttaaacagctgtttgcacaagtaacgaacccgccaatcgacgcgattcgtgagcagcttgtcacttcaacgatgacttggctcggtgcggaaggcgatcttcttcatccaagtgaacgaaatgttcgccggattaaactgtatacacctgttttatccaatgaacagttttacgcattgaaaacgattgttcatcctgatttaaaaagccaaaaaattgatgtgctgttttcagaggatcttgaacgcggtttaaaggacatgttcacacaggcagagaaagccatcagccaaggcgtaagtttgttaattttatcagacaaaaagatgaacgaacgactgacaccaattccgccgcttctggcagtaagcgcactgcaccagcacttaatccgcaaagggctgcgtacgaaggtcagcattattgtggaatcgggagaagcacgtgaagtgcatcactttgcagcgttaatcggttatggcgcagatgcgattaacccttatctcgcttatgcgacctacaagcaggaaattgatgaaggccgtttggatatcagctatgaagaagcggttagcaaatatggaaaaagcattactgagggcgtcgtaaaagtgatgtccaagatgggaatttcaactgtgcaaagctacagaggcgcacaaatctttgaggcggtaggaatcagccgcgatgtgatcgaccgctatttctcaggtactgcatcacagctaggcggcatcgatttacaaacaattgcagaagaggcacagcgccgccaccgggaagcgtatcaggatgattacagcaaaacgcttgaaccgggaagtgacttccaatggagaaatggcggagagcatcatgcgtttaatccgaaaacgattcatactttgcaatgggcgtgccgcagaaatgattacaatctgtttaaacagtatacaaaagcggctgatgaagaacgcatcggatttttgcggaacttgttcgcatttgacggaaaccgcaagcctttgaagttggaggaggttgaatccgctgaatcgattgtcaaacgttttaaaacgggtgcgatgtcattcgggtccttgagtaaggaagcgcacgaagctttagcaatcgcaatgaaccgtcttggaggaaaaagcaacagcggtgaaggcggagaagatcccaaacgctttgttccagatgagaacggcgatgatagaagaagtgcgatcaaacaaattgcatccggacggtttggtgtcaaaagccattacctcgtcaatgctgatgagctgcagattaaaatggctcaaggtgctaagccgggtgaaggcgggcagcttcctggcaacaaggtatatccatgggttgccgatgtccgtgggtcaacgccaggtgtcggattaatctcacctccgccacaccatgacatttattcgattgaggatttagcccagctgatccacgatttgaaaaatgccaaccgtgacgcaagaatcagcgtaaagctggtgtcaaaagcaggtgtaggaacaatcgctgcaggtgttgccaaagcgactgcagatgtcattgtgatcagcggctatgacggaggtacaggcgcttctccgaaaaccagtattaaacatacagggcttccgtgggagcttggccttgcagaagcacatcaaacactaatgctgaacggacttcgtgaccgtgttgtattagaaacagatggaaagctcatgacgggccgcgacgttgtgatggctgccttgctcggcgccgaagaatttggtttcgcaacggctccgttagttgtactcggctgtgtcatgatgcgtgcctgccatttggatacatgccctgtcggtgtagcgacacaaaatccagagcttcgcaaaaagttcatgggagatcctgaccatattgtgaactatatgctgttcattgccgaagaagttcgtgagtacatggctgcgttaggcttcaagacatttgatgaaatgatcggccgcactgatgtacttcatgtaagtgaacgggcaaaggagcactggaaagcaagccagcttgatttgtctacccttctttatcagcctgaaggggtgcggacgttccaatcgccgcaaaatcataaaattgatcaatcacttgatattacaacaattctcccggccgtacaagaagccatcgaatctggaaaagaagctgatatttcgattgaaatcaataatacaaatcgtgtagccggaacgataaccggcagtgaaatctcaaagcgttacggagaagaaggtcttcctgaagatacaatcaagctgcactttaccggatcagccggccaaagctttggagctttcgttcctaaagggatgacgctttatttggacggagactcaaatgattacgtcggaaaagggctttctggcggaaaaatcatcgtcaagtcatcagaaggattcaactctgcttcggatgacaatgtcattatcggcaacgtggctttttacggtgcgacaagcggagaagcatatattaacgggcgtgctggtgaacgctttgccgttcgaaacagcggtgtgaacgtagttgtagaaggcatcggcgaccacggctgtgaatacatgactggcggcagcgttgtcgttctcggtgatgtaggcaaaaactttgcggcaggtatgtccggcggaatcgcttatgtactgaccgaagatgtcaaagcgtttaaacgcaaatgcaaccttgagatgattttatttgaatcattagaggatgagaaagaaatccagcaaatcaaagcaatgcttgaaagacatactgcgtatacaaacagccaaaaagcagaagatctgctagatcaatgggaagacagtgtgaaaaaattcgtcaaagtcattccgaaaaactataaacaaatgctcgcaagcatcgaagagcaaaaagctgcaggtttatcagatgaagaagccatcatgttcgcttttgaggccaacacgaagccaaagcagaatacagcagcatcgggacaaaaacaagcggtagtacagtaaggaaggggagaggaacatggggaaaccaactggatttatggagatcaaacgagaaaaacctgcggagcgggaccctctcactcgcttaaaggattggaaagaatattctgctcctttttcagaagaagcatcgaaacggcaaggggcgcggtgtatggattgcggtacaccgttttgccagatcggtgcggacattaacggatttacatccggctgtccgatttacaacttaattcctgaatggaatgatcttgtctaccggggcagatggaaggaagcattggaacgtctgttgaaaacaaacaactttcctgaattcacagggcgggtatgccccgctccttgtgaaggatcatgcactttagcgatttcagatccggccgtatcaattaaaaacatcgagcggaccattatcgataaaggatttgagaacggctggattcaacctagaattccaaaaaaacgaacaggcaaaaaagtggccatcgtcgggtcaggcccagccggactggcgagtgctgaccagctgaatcaagcgggacattccgtcactgtttttgaacgagcagacagagcgggcggccttttaacatacggcattccaaacatgaagcttgagaagggcattgtagaacgccgaattaaattgctgacgcaagagggaattgattttgtcacgaacacagaaatcggtgttgacattacagctgatgagctaaaggagcaatttgatgctgtgatcttatgcacaggcgctcaaaaacagcgggacctcttaatcgaaggacgcgactcaaaaggagtccattacgcaatggactacctcacacttgcaacaaaaagctatttagattctaattttaaagacaagcaattcattgatgccaaagggaaagatgtcatcgtaatcggaggcggagatacaggagctgactgtgtggctaccgctctgcgtcaaaaagccaaaagcgtgcaccaattcggcaaacacccgaaacttccgccagcccgcacgaatgacaatatgtggcctgaacagccacacgtctttacgcttgaatatgcatacgaggaagcagaagcaaaattcggaagagatccgagagaatactccattcaaacgacaaaaatggtcgcggataaaaacggaaagctgaaagagcttcataccatccaaatggaaaaagtgaaaaatgagcatggaaaatacgagttccgcgagctgcctggaacggaaaaagtatggcctgctcagcttgtctttatcgctatcggctttgaaggcacagaacagccgctgttgaaacagttcggtgttaattcagtaaataacaaaatcagtgcagcatatggggattatcaaacaaatatcgatggtgtattcgccgcaggggatgcaagaagagggcaaagcttaatcgtatgggcgattaatgaaggccgtgaagtggcgcgtgaagtggatcgatatttgatggggagttcagttcttccgtaaataaaggggattatcatataagagaaaccggtctggctgccagccggtttctttttttattccattacgatcccgatgtttccaaactgtctgccttcctgcattcttttatatgcttcacatgctttttctaaaggatatatccggtcaattacaggccgcagcttatgtttgtcaatgaaagcgagcatagcttgaaattcctcaccgcttcccatcgaggttcccaaaacattgacctgaggaaagaataaagaacgcaccggaaaactgagattatcccctgagcttgccccaaagctgacaatacggccatttggttttacatggcggaagtattccgaaaagagggcaggtcctatgctgtcaagaacaacatctatcttttttccctgcaactgctcatcccaattgctgtagctgtcaaatgcgtaatcagcacctaatttcagcgccttttttcttttctcctcactgcgggaggtcacgcttactgttgccccaatcgccttagccataaataaagcgtaggttgctacaccgctgccgatgccgggtatcaatagatgctcgcctttttttaattgcccctttgtaaacagagcccgatatgcagttaaagcggataaaggtaaaacgcccgcttcttcccaagataaataagcaggttttttgattgcattttgtgaaggaatgatcacatattcagcaagtgttccgtccgaaggacctcccagaatctcaggtacaggtggaacattttctgtcaaatcccagttcaatgtcgggaaaatgactacttctgtctgaacagtaacatttttcacgccttcaccaatctcttcgatgatacccgcgccgtcagaacccagtatcatgtgaggatcttgttcagatttgtttttcataagaaacaagtcacgatgattcaggcctgcagattttaatttaacctttacctctccgtatccaggctttgttgatggaacgtcctgaactgataaccccagaagaccggcttttccgttgtgaattacagctttcatgctgtctgcctcctcattaattgtattttcatatctttacatattttacatagcggttttcttcgagtaaaatgaacaaatatgatagccaatatcacttttcatcatagcaagcaggtgagagcgcgtggaaagcggagatttaaagatttttcaggctgttgctcgcgaaggaagcataacgaaagcagcccaaatgctgaattatgttcagtcgaatgtgacagccagagtgcataaccttgaggaagatttgaatatcaggctttttcatcgaacgaatcggggaatgaagctgactgctgcaggagaaaatcttttacaatatgcagatcaagtattatcgctgttagaccaagctgaaaaatcgacccgaatgagcaggcaaccaaaagggcctttgcggatcggatcactggaaacaatggcggtaacgcatctgcctgagcatgcagcatccttcctcaggcgttttcctgaagtggatttatcagtgaacacagctgatacgcatcatttgattcaacaggttcttgatcataaagttgatggcgcttttgtatatgggccggttgaacacgctgcagttagacaactccatgtctcccatgatgaattagttttgatttcatcacgagaagggacggcagaagacatgcttcagcagccgatgctcttttttggggctggctgttctcatcgtgacagggtcaaaagattactagaggaagcaggcatacacaatcaaaaaatcatagagtttggcacattggaggctattataaaaggtgtttccgccgggatgggtacggcgctgctcccaaagtccgctgttgacggctccgagcatcgtacaaatgtatggattcatcagctgccaccatcatatcaagacttagagatcgtctttatatacaggaaagacttttttattacgagtgcgtttcagacatttcttgatgagataaacgaaatgaaaagatgaagatagacgtgcattagcagaataaagacgtttgtcagtttttattttaaagatctgcatgaaaaaactgtactcatttgaagcgagtacagttttttatttatttacgttttaaattaatgccgatcgccgcgccgtttctgcttgaatcagctacacctttaaaggtgccgttttcatggtcgatcgatatactttgcacgtttccgatatccaccggacttgtgccgaatttgtggcccatgccgtttagcttgctgaggacatctttaggaactccgtcttcgtaacggtaagagctcatgctgtttgtgtaaattctcggctcttcaacagctgcttttaattccataccatattcaatgtggtagagaatggtttgcaaaacggatgaaataattgtggccccgccaggagatccaaccgtgaggacaggcttgtcatccttaaataaaatcgtcggggtcatgctgcttaaaggccgtttgtttggctgtacttcgttagctccgcctggtatcgcatcaaaatccgttaattcattgtttaaaataacaccgtaatcagggaccataatacccgttccgaatagctgttcgattgttgttgtataagaaacaacatttccccaacggtcagcaactgtaaagtgggttgtttggccttctactttgtctttcggctgttcaacttgtttatagtttgctgatccttcttggtatttccaagggtcaccggctttcggttttttattcacttgatctaggttgattaattgctggcgttctttaatataatcggggtgaagcaggcctttgagaggaacatttacaaattcgggatcacctgcgtaagacgcacggtcggcatatgacaaatgcatcgtttcagcaagcagctgatatttttcccatgagcggacatcgtattgtgaaaggttaaaatgatcaaggattttcagcatttgcaataagaaaataccgccggagcttggaggaggagtagtagcgatttgatagccttgataatctccccaaatcggttcatcaattgtaatgtcgtaattttctaaatctttttctgtcattgatccgccgaaatcctggacagtgtcagaaagcgtcttggcgaattttcctttataaaaagcgtcagtgcctttggagcgaataagcttaaatgttttagccaaatccttttgaataagggtatctccttctttaagcggttcgccatttggtaaaaatacatcttttgcggcagtccgtgaaagcttttcctgataatcagaaatggcctctgccaacaccgaatcaatcggaaagcctttttcagcgagtttaatagaaggggtaattaattgcttcatcgaacgggttccccatttatccaaggcttcttccagccctttcagagtgcctggaacaccaacggcagtaccttttgttacacgttcagagaaaggaattgctttgccgttttcgtccagaaacatatcaggagttgcgcctgctggagcacgctcacggctgtcgattatcgttgtatccttcgtttttccgtcatacaccatcataaaaccgccgccgccaatacctgacatcatcggctctgttacattgagtgcaaattgaatggcaaccgctgcgtcaatagcatttcctccttttttcagcacatcagcaccgatttcagaagcaagaggatgtgcggtcgcaaccatgccgtcttttccaacatctacttgtttgtactcatcgtagcttttgggcggttttttagcttccgcgtgaaaagggacacttccagcgactaacagaacactaagcagagctgttaaacagacgttccacgttcttttcatgttctccctcctatatgaagctgtattgttacaatcttagcgtaaaaaaattacagcgttttcacaagtgacaaatggtatattatatagtgcataatgccgtttttctgtgcagaattgattatattgatatgagccatgtgctatattagaatcagcatacggattaagaagggactgctatatgtatttaacgattgaagaaacagcagaatatacaaatctttcagaggattatattaaaagcttggtgctcgaagggaaaatcagagccgttcatgacggggagcaatttttgatttataaggaacagttcaaaacgcatctcgaacagctggagaattacaaagcacttgtgcaggaaatattaaatgaaccgatcccggaagatattgatgtaaaggatgaggattaggacacaatttgaaattgtgtctttttttgtatatttttgcggaagctccagaaaattgggagtgtcagatttcattttaagaggttttttgatgattagtagggggataagtatccaagaggttaaaagctttataagaggctttaaagcttattttatagggtgaaggttggaagaagcttttttaaaagcttatgtaacactatgtatattatgttacataaacgccgccgcactttgacattcaacgtttttcagctataatagtaacatagacctcaaaatgttacataacggtttttaaggagttttttgatgcatattgtacagccgattcgcagtctagagaaaatccaagaagtcaaacagtatttgcttaacaaaaacaagcgggattattttctgtttattttcggcatcaacagcgcgctccgtatttctgatattctgccgctgcaagtgaaggacgttcaaaataaagatcatttatgggcgactgaaagcaaaacgaaaaagaaaagaaagattcttattttagaatcgctgaaacaggaaatatacgagtatacgaaagacatgaaggaaaacgaatatctttttaaatcagtgcggaccaggaagccgatttcccgcattcaggcctacagaattttaagagaggccgctgcagcgtgcggacttgaggagatagggacgcatacactccggaaaacgtttggctatcatttttatcagcgaacgaaagacatcgccgagctgcagagaatactgaatcattcatcaccatcaattacaatgcggtatatcggtattgatgaagatacgacaagagccgcatataaggtttttggagggctttaatacaaatcgcttgaaaatattgatcatcagagctactatataaataccaaaagctctagtagcacagcggatagtgcagcagtttcctaaactgcaggtcgggagttcgaatctctcctagagcgttatattcacaaaaagacaacaggcacttttcgcctgttgtctttctttatgcaaaccaaataaaaaacgcccgcttataccgggcgtttttcttatataactgcgtcaaattgattgactttccattttttattttctttcacaaatgtcactttccgttttgcagaaggggatccgtctaatgtagggacagtaaattcgtatgtgattgtgctgccttttttagagatcagtttagcagttgattttttccaattcaaaagattgtctccgtcaccgattggaacagcaagttttccttttgaaacagtgaaatgataatctttaaagcctttttcgattgctgtttttgtaaaaataggagttaaataattcaccgcttttgctttagtgcctagatcactgcacatgtatacatattgaagattttgatactcgaatgtgcctgatgggcaaactgcttttttcaccttcggattgtggccgctcatggtgttccaaaaatgttctctagcggataatgccaactgtaatgcttgtttttgtgataaatcgcctgatgtatttttcgcaaatgcatttgtgcttaatgacagaataagtgcaatggttgttagaaatagaagacattttttcattatcgctctctccttcaaaatctctttctcttatgttacaaatgttacaataattacggatagattacaatacttttgcataaattattttttattcttttactcacaaaaaatacgccattacttgctagtttattcttcataagctaaaaagatgtgtaaaattagaagaatcgggaagggtttcataagtgcagtgatgaataataacatgttacatatcctgtttttgtcaaaaaatgagggcatgtttaaaaacgatttcaaataaaggagtcctttaatatggaaacatcacaagaacctcttgtaactcaaaagaaaagcaaaccatcagtttggcggtcgatgtcactctttttagtgccgcttctgctgagcaatgtgctgcaatcagtcggccagctagtcgggatgatggctgtaggcagatggctcggtgttgatgcagtggcagctgtatcatcctttttcccgttattttttcttttaatctcatttacgattgggatcggttcaggaagttcgattctgataggacaagcttacggagcgaaaaatgaggaacggctaaaggctgttgtcgggacgacactcacgtttacatttttattaggcgttgtgttagccgttatcggcagtattttcaccctggatatccttcgtttaatgggaacacctgaaaatgtcattcatgtcagcgctaactatgcacgtattttattttatgctatgccgtttatgtttttatattttgcatatactacctttttgcgcggaacaggagattccaagacaccgttttatacgctgattgtgagcacggtcatcaacatcgcgcttttgcctgttttaatccttggcatgtttggttttccgaaactgggcatatacggctcggcatatgcaactgtcatttccacgattgcgacttttctcgtgttaatggtgtatttacgaaagcgaaaacacccgctgcaatttgataaaacagtgcgtcgttatttgaaaatggataaggaactgctggttctcctgctgcgtcttggggtcccagcaagcatcaatatgattcttgtctcattatcagagatagcggttatttcattcgtcaatcattacggctctaatgcaacagctgcatacggagtggtcaaccaggtggccagctatgtacagatgccggccgtcagccttggtattgcggtttctattttcgctgcgcaatcgatcggagcaaacgagtttgaccgcttaaagcaggtcattcgcgttgggatttggctgaattatatcattggcggcgtactgatcattctgatctatgttttttcacatcagattttatcgttatttttaaccgagcaagagacgctttacattgcgcaccgtcttttgatgattacactgtggagctatttgctgtttggaaatgcccaaattatttctgcaacgatgcgggcaagcggaacagttttatggccgaccgtcatcagtatttttgcaatctggggagtagaggtgcctgtcgctttcgtcctttctcactatacaaagcttgaaatactcggcgtctgggttggttatccagctgcgtttgccgtcagcttgctgttgatttatgggtattatcaattcgtctggaaaaagaaacaaatcacacgtctcatccaatagcctccgaatcacaccgttcataagtttgaacggtgtttttttatttgataggggaaaatataaaatggaggaaatatggtacagtacattgaattcttatactagcaatgaatcaaggagaggttgagtaaacatggcaaactttattgagaaaatcacgtatttgggaacgccggccatcaaagcgggcaacgaacatctagaaatgattgttgtccctgagtgggggagcaacgtcatttctctcgtggacaaaacaacaaatgtccagcttttgcgtgaaccggaaacagcagaaagttttcacgacacaccaacattgtatggcattccaatcctgttcccgcctaaccgcataagtgacggtacattcagtttccggggcagaacgtatcattttgatatcaacgagaaggataaacacaaccatcttcacgggtttctttaccatgaaaagtggaatgtcgtgaccacgaagcaaactgatgaaggagtgattgttgaaacagaaattgatctttctgagcttccccatgtgcagaagcaatttcctcatcatgccgtcgttcggatgacatacacgatcaaggagaataccctatttaaacatgcgacggtcatgaacaaaggaaaggaagcgtttccttggggaattggttatcatactacatttatatttccggcagaaagctcgttattctccctgacagcagatcagcaatgggagttggatgaacgcctgctgccgaccgggaagctgatggatgtcccgtataaagaagctttgcatgaaggaatggatttgcgccacaagcagctggatgatgtctttttatcttcttatcagaagaggggcggagaaaaccaggcagtcatttatcatcagcatgcacatatcagcattatttataaggcagatgaacagtttaaacattgggttgtatacaatgcggacggaaaacaagggtatttatgccctgagccttacacatgggtgacaaacgcagtgaatcttgatttaccttcgtcactcactggtttacaagtgctggagccgggagaagaaacgacagctaaaagcagtatcaccattgaactgaatcatcaatagccaatgatgaagcgcagagaggcggggaaattaatgaaaaaaagcataaagctttatgttgctgttttactgcttttcgtcgttgcttcggtgccttatatgcatcaggctgcgcttgccgctgaaaaacaagatgcactttccgggcagatcgataagattttagctgatcatcctgccctcgaaggcgcaatggccggcatcaccgttcgctctgcggaaacaggtgctgttctatatgaacattcaggagacacccgaatgaggcctgcctcttctctaaagcttttgacagcggccgcggcactttctgtccttggcgagaactattcttttacaaccgaggtccggacggatggaacactgaaagggaaaaagctgaatggtaacctttatttgaaagggaaaggcgatccgacacttttaccatctgattttgacaaaatggctgagatattgaaacattccggcgtaaaagtaattaaaggcaatctgatcggtgatgatacgtggcatgatgacatgcgattatcacctgatatgccttggagcgatgaatacacatattatggcgcgccaatctccgctctaacagcgtctccaaacgaagactatgatgcaggcactgtgattgttgaggtcaccccaaatcaaaaagaaggggaagagcctgccgtgtctgtctctccgaaaaccgattatataacgataaagaacgatgctaaaacgactgctgccggttcagagaaagacctcacaatcgaaagagagcatggaacaaacacgattacaattgaagggagcgtaccggttgacgcaaacaagacaaaggaatggatttctgtctgggagcctgccggatatgccttagatttatttaagcagtcactaaaaaaacaaggtattactgtgaaaggggacatcaagacgggtgaagcacctagttcttcagatgtgctgctctctcatcgctcaatgcctttatcgaaactttttgtgccgttcatgaaattaagtaataacggacatgccgaagtgctcgtaaaagagatggggaaagtgaaaaaaggagaagggagctgggaaaaggggctcgaagtgttaaacagtacgcttccggaatttggtgttgattctaaatcactcgtcttaagggacggatcaggaatctcacatattgatgctgtatcctcagatcaactttcacagctgttatatgacattcaggatcagagttggttctcggcttatctaaattctttacctgttgcggggaatcctgacagaatggtgggcggaacgctgagaaaccgcatgaaaggcactcctgcacaaggaaaagtaagagcaaaaaccggatcgctcagtacggtaagctctctatcggggtacgcagaaacaaagagcggaaaaaaacttgttttctctattcttctaaatggattgattgatgaagaggatggaaaagatattgaggatcaaatcgctgtcattttggcaaatcaataatagcgggagacctgttttccaagagaaaacaggtttttttatgtctgtaataacgctttgtcgaaccttccaacaattagaagaatgatgcacaaaagaaaattagtccgattaaaaagtagtgtataagaccttatgtaaaacaatacttttatcactttatatccggaaatttgataaaaaaagaaacgaaaaataaagaaataatactatattcaaaaaaaatgttataaaaatttaatgttttttattgtactttaaaaaatatccgttaatatagtgcatatatggattatatagtcatataatttcttttattgtcatttttctgcttttttctacattttcttatcctcttattatgagaactggagggaatccgttgagcgaacatacttattctttaacccatgcccaaaggagagtgtggtttaccgaactgctggagccagataccagcatttgcaatcttacagcttgtgtgaaatttaaaggcaatattgagcttgatactctggagggagcactgaatcattccatctcccgcaacgacgccattagatttcagctgttagaaggagaagagcttgagcctcgattgcaccttactgaatataaatattatccacttagaataattgatttttcaaatgttgaaatgatagaaatagagcaatggattcaggatcaagcgagcattccatttaaactgttcaactcgcctctttttcaattttacctccttagaattgactctcatgaagtttggctatttgcgaaattccatcatatcataatggatggaatctctttaaatgtgatgggaaatcaaattatagatctttatcaaaaaatgaaaaagaaagatcctttacctgatcagccggaaccttcttacttgagctacatcgaaaaagagagtcaatatctacaatctccacggtttgcaaaggaccgtttattttggacgcaaacctttgagcacccgttggaataccactcgttagccgaccagacgtccttacaaaaacagagcacatctgcatccagagacaccatcattctttcacctgatctagagcaaacgattcgaatcttctgcgaagaacacaagatcaatatcatttccttatttatggcttcattttacatatgcatcagccgaatcacttctaaaaaagatcttgccattggcacctactatggcaacagaggttcaaaggctgaaaaagaaatgctcggcatgttcgttagttcccttccaatcagaataacggttgatcctgacacagattttctttcctttgtccgcacaataggcagggaacagctttctgttatgcgtcatcaacggtttccttataatttgcttgtaaatgaattaagaaatgaacagaaggatttacacaaccttatcggtatatctatgcagtatcagccacttcagtggcacaatgcagatgattttgactatgaaacagcgctttatttcagcggatacaccgcgaacgaactttcagttcaaatacaagaacggatagacaatggaaccattcaattaaatttcgactatcaaaataccttgttttctcttgaggatattaaacgaatacaatctcatctgcttaccatactggaaaacgcccttaaacatccgcacagctttataagagaattagatatgacgaatacaagagaaaagcaaaaattgttgtatgagtttaacaagacggaagctgtttcgcctaaagctttcaccctgcatgggctgtttgagcgacaggcagcttgaaatacgggtaaatgggcgttacgctgctgccgctatgacgaaaatgttgccgtgacgatcctcgacctgccgcagcagatagcgctggcgcaggaaaacatcgcaaaagcaggtttttctcatcgtattggattccatgctgtcgatatgcttagcccagcagccttgccgggtgaggccgacgtctggtggatgagccagtttctggattgtttctctccggatcagattgtcgccatgctgacgcgcgtcgcacaggtcatgaagccaggcgcacgtttgtgcatcatggagcttttctgggatgcccagaagtttgaagcggcctctttcagcctgaatgccacctcgctctatttcacctgtatggcgaatggcaatagccggttttacagcgtagaggcgttttatcgttacctggagagcgcaggtttcagcgttgaacagcgtctggataaccttggggtcggtcataccctgctgatatgcaccaaacgtgaacaatagagcagcttagctgcccgggtggccaggtctgccctttgaatacggtttttttttcgcggacgcgcgtagatgaaattttcactgaacattatcgactggcaggcgagagccccaggactcagcgatgtcacagagtggcaggcgtggtcacgcctgcagctgcccgtcgatccagcggccccccttccccggctgaccgctttacccatgatgaccgcgcgccgcctcaattcaggcagtaagctggcggtggacattggtctcgctatgctgcaacaccacgccattgatgccgtcgtctattccagccgccacggcgagctggagcgcaactaccgtattctgcatgctctggcgacggggcaatccgtatcgcctaccgacttcgccatgtccgtgcacaactcggcggtgggcaatctcacgattaccgcacgccaggcaatcgtctcgtcatccatttctgccgggctggacaccttccagcaggcattatgtgaagtcctgagcctgctgcaggcgggctactcccgcgtcttgctggtcgattttgacggcgcactgccggaattttaccacccggcgttaccgcaccagatgcccacctggccctacgcgctggcgctggtgattgaatccggcaaggaattgcagtgtgaaacccgcagcggcagcatgggggatgaaccctcccttccgcaaagcctggtgttcctgcaacgctatctcagcgaggcacgccagtttgtggtacccggcgaacgtttgctgtggcaatggacgcgcgcatgaaccgcctgactgcccgaattaactggttatggcgtctggtgatgaccggattctgcttcgtgctgtttggcgtgggcgggctgctgctatcactggtatggttcaacctgctgctgatcgtccagcgcgaccgcaccaaccgccgtcgccttgcgcggcgcagcattgcggccagcttccgcgtcttcctgaccgttgcccgtggcctcggggtactggactatcgcattcacaatcttgacgccctgcgcaacgatcggggttgtctggtggtggctaaccaccccacgttaattgactacgtgattctggcatcggtgatgccggaaaccgactgtctggtgaaaagcgcgctgctgcgcaatccgtttgtcagcggcgtcatccgcgcggcggattacctgattaacagcgaagccgagcctctgctggctgcaagccagcagcgtctggctcagggcgacacgctgttaatcttcccggaaggcacacgtacccggtctggtgaagctatttccctccagcgcggcgcagcaaatatcgccgtgcgctgtaacagcgatctgcgggtggtgctgatccactgtagcgaacatctgctggataaaaaaagtcgctggtatgatgtgccgccagaaaaacctgtcttcaccgtggatgtccgcgaccgcgtgaacatcgacgaattttacgatgcaaatgaacaagaaccggcgctggcggctaggcagttaaaccggcatctgcagcatcgattaacatcaggccttcaatctttgtcaggaattaatgatgcaagcgctttatcttgaaattaagaatctcattatcaccacgctgaatctggacgagcttaccgcagaggatattgataccgatgccgcgctgtttggcgatgggctgggtctcgactctatcgacgcgctggaactgggtctggccgtgaaaaactagtatggcgtggtgctttccgctgaaagcgaagagatgcgccagcacttcttttccgtcgccacgctggcgtcctttatcaacgctcaacgcgcctgagatgtgatcacgatgaccgaacaagaaaccatttatcaggaagtctgtggccttctgacccgactgtttgaaatcgacccgcaggatattacccctgaagcccgtctttacgaagacctggagctggacagcattgatgcggtggacatgattgttcatctgcagaagaaaacgggcaagaaaatcaagccggaaaccttcaaatcggttcgtaccgttcaggatgtggtagacgccgtcgaacagcttctgcgcgaagagtaagacgtcgtgcgcggcggacggacattcccgatcatcccacttctgacggggttgatgctgctggcgtggcccttcctgattggatttgggctggcgcataacagcctgcagtggctattacccgtgatggctctggtgttactgctgcggctgcgtcaggcgcagcggaacacaagcccgatgcggtatgtggtgcagtgcgtggcgctggcggggatcgccctctgcacggcaagctacctgctgaaagcccaccagtggctgctgctctacccggtggtcgtcaaccttgtcatgctggccgtgtttggcggttcgctgtggacagcgatgccgcttgtcgaacgactggcgcgcttgcgcgagccgaacttgcccccggagggcgtgcgctatacccgtaaggtgaccctcgtctggtgcggttttttcgtcggcaacggcacgatggcgctgtttaccgtcctccacggcgacatgcatctgtggacgctatggaacggtatggtggcttacatcctgatggggatgctgatggcagcagagtggctggtgcgccagcgggtgataaaaaaagagatgcacaatgactaacccccttccgctgggccagtggttaaatgcgccgcgccctgacgacacgcctgttgcatggcttgacgatcgtacctggacgctgggccagttgcgccacgatgtaaccttactggtcgagaccctgcgtcagcaggaaggcgagcgctgggcgctgtgctttgaaaacagctacctgtttattgttgcgctgctggcctcgctgcacgccggtaaaacaccggtcattcccggccatagccgcgtctcgcagcttgaagaacagcaatctttgtttagcggcgttctgagcgatcggactcttggttttcatgggaaacagattgtggttgcctccagccaccagacagccagccactgggtgcctctgccggccattgacgaaaaccgcttcgttgaactgttcacctcaggctccacgggcacgccgcgccgggtggttaagcacatcgtcagtctggatcgcgaagcccgactgctggctaaccgctttggtgagcgtctggccggatgcagcattgtggcctcggtcgtaccgcaacatctgtatggcctgacattccgtatcgtcttgccgatggcgctgggcctgccgctgcatgccgcgatgctctattacgcagaacaactggccgccctgcctcctgaccggcaatacctgttcatcagcagcccggcgttcctgaagcgcctggataccgagcttgccgcgccgcccgtcaggatgctgatttcagcaggtggaatgctgccctggcgtgacgtctcgaccacctccggctggcttaacctttggccggatgaaatttatggcagtaccgaaaccgggatcctcgcctggcgccatcgtcaggaggataacgtgccctggctaccgttccccggcgtgatcttccatcaggaagatgacgcctgtcgcgttacgtcgccactgatccatgagccagaagggctccagctcgacgatatcctgcacttcgacagcgaggggcttttcagcatcgccggtcgccgcgggcgggtggtcaaaattgaagaaaaacgcatctcgcttaacgagatcgaacgccgcctgctggagctcgacggtatttgcgaagcggccgcactgccggtcacgcgcgggggtcgtcaggggattggcgccctgctggttctggatgaaacggcccgtcagcgcgggtatgtgcaggataaaaaagcgcaggagttcgcctggcgtcgcgccctgctgccgtggcttgaacctgtcgcggtgccgcgctactggcgcatcgttgatgaaatgccggtaaacagtatgaacaagcgtgtctatgcgcagttagaggagttatttcatgaaaattcatgaaattgagcgccaccagacacagccggagaagctggagatcgttttgcatctcgacgcaacgctgttctggtttcagggccatttcgccgtacaaccgctgctgcccggcgttgcgcagcttgactgggtgatgcactacgccacgacgttactggcaccgggctatcgctttcacagcattcaaaacgtgaagtttcaggcaccactgctgccggaaaccacggtgacgctgatgcttgagtggcatgccgaacgtcagatgctgaccttcagctatcaacgccatgccggggctgagcgccacaccgccagcagcgggaaaattcgtctatgtcagtaatctttcgtccctgcgtgctgatcccgtgctacaaccatggcgcgatgattgccagcgtattgtcacgtctcgcgccgttcggcctgccgtgcctggtggtggatgacggcagcgacgcagtcacccgtcgggagcttgagcgcctggcggcggagcagccgcagatgacgctggttcgtctggcgcaaaacgccggaaaaggtgccgcggtcatcagagggctggaggagtgcgcgcggacgggttacacccacgccgtgcaggtggatgcggatggtcaacacgccattgaagatatccccaaactgctggcgctggcggagcgccacccggacgcgctgatttccggccagcccatttacgatgactctattccgcgctcccgactttacggacgctggatcacccacgtttgggtgtggattgaaaccttatcgctgcagcttaaagacagcatgtgcggctttcgggtctatccggtttcccccacgctgcgactggcagcgcgcgaaccgctcggcaagcggatggactttgacaccgaagtgatggttcgtctctactggcagggcaacaccagcgtctttctgcccacgcgcgtgacctatccgcaggacggtttgtcccacttcgacgcgctaaaagataacgtgcggatctccctgatgcatacccggctcttcttcggcatgctgccccgcatgcccggcctgcttttccgtcgacgccgccagcactgggcgcagcaggacgaggtcaagggtctgtgggggatgcgcctgatgctgcgcgtctgggaactactgggtcggcgggcctttaccgtgctgttgtggccggttatcggcgtgtactggcttatcgcgcgtccggcgcggcaggcctcgcggcagtggatggcgagagtgaagcaagaactgcgtcagcggagcatgcctgttccctcacggcttaacagctttttccatttcatgcgcttcggcaacgcgatgctggataaagtcgccagctggcgcggcgagctgaagcttcatcgcgatattgtctttgcccatggcgcgagcgaagcgttaaacatcgcggctccacagggcaaactgctgctggcctcgcaccttggcgacgtagaggcctgccgggccctggctcagctggaaggcagtaaaatcatcaacgccctggttttcagcgagaacgcccagcgctttaagcaaatcatgagcgaaatggcgcccgaagctggcgtgaatttgatgtcggtcaccgacatcggcccggacaccgccattgccatcaaagagaagcttgagcgcggtgaatgggtcgcgattgtgggggatcgcatcgcggtgaatccgcagcgcggcggcgaatggcgcgtgatctggagccgattcatgggccagcctgcaccgttcccacaggggccgtttatcctggcctccatcctccgctgcccggtggtgctgattttcgccctgcgccagcagggtaagctcgtcctgcactgcgagccgtttgccgacccgctgcgcctgccgcgcggtgaacgccagcaggcactgcaagataccgtcgatcgctatgcgcagcggctggaacattacgccctcatgtcgccgctcgactggtttaattttttcgatttctggcatctgccagagtccagtgagaaggagtaaagggtgctgaccgatccccgctttacgactgaagtcgagatcaccgttccgttccacgacgtcgatatgatgggcgtggtctggcacggtaactatttccgctactttgagatcgcccgcgaggcgctgctcaatcagttcgattatggctatcgccagatgaaggcctccggctacgtctggcccgtcgtcgacacccgggtgaaataccgcgatgcggtgacctttgagcagcgtattcgcgtccgcgcgcacattgaagagtatgaaaaccgcctgcgcattgcctatcaaattttcgatgcacagaccggcaaacgcacgaccaccggttacaccattcaggtggcggtggaagaagcgacccgcgaaatgtgctttgtgagcccggcaatactgtttgaacgtatgggagtaacaccatgaaatggttgcctttactagcgctgatcgtcagcccgctggtcagcgccgtgacgctggatgagctgcagcagcgcttcaccgagcagcccgtggtgcgcgcgcacttcgaacaggttcgcacgataaaagatatgccgcagccgctgcgctcgcagggcgagatgctgatcgcccgcgacagcggcctgctgtgggatcaaaaagcgccgtttccgatgacgctcctgctggacgacaagcggatggttcaggcgattaacggccagccgccgcaaaccatcactgccgacaataatccgcagatgttccagttcaaccatcttctgcgcgccctgttccaggcggaccgcaaggtgctggaagagaacttccgcatcgattttaaagacctgggagcgggccgctggtcgctggtgcttacgccaaaaacgacgccgctggacaagattttcgccaccctcgatctgggcggcgcgacctatctggaaacgattcgcctcaacgacaaacagggcgaccgtaccgatatcgccctttctcgccaccaactgacgcccgccagcctgaccgatgacgaacgccaacgctttgccgcaccgtaaatccctgcgcccggcgctgctgtgggccacgctatgcctgattctgctgggcgtgttgctgtcgcttctgcccggcgcgcgactgaacagcagcgtgctggccatgctgccgaagcagacgctgggggcgatcccgccggcgctcaacgacgggtttatgcagcgtctcgaccgccagctggtctggctggtcagccccggcaaagagccggatccgcgcgtggcacagcagtggctggcgctgctgcaaagcactgattcgctcagcgaggtcaaaggcccgatggacgccgccgggcaaaaggcctggggagagttcttctggcagcaccgaaatggcctgattgaccccgccacccgcgcccgcctgcaaaacggcggagaagcgcaggcgcagtggattttatctcagctctactcggccttttccggcgtcagcggcaaagagctgcaaaacgatcccctgatgctgatgcgcggctcgcagctcgctctggcgcaaaacggccagaagctgcggctgatggacggctggctggtcgcaaaagatgaggcgggaaactactggtatctgctccacggcgagctggcgggctcatcatttgatatgcagcagacccaccggcttgtggcgacgcttaacgcgctgcaggagacgctgaaagcccgctaccctcaggcacagctgctttcccgcgggaccgtgttctacagcgattacgccagccagcaggccaaacgtgatgtttcgacgctgggtatcgccaccctgcttggcgtgttcctgctcatcgtggcggtgttccgctctctgcgcccgctgctgctgagcgtgctctccattgccatcggcgcgctggcggggacggtggtgacgctgctgctctttggcgagctgcacctgatgacgctggtgatgagcatgagcatcatcggaatttcggcagactacacgctttactacctgaccgaacggatggtacacggcgcggagcattctccctggcaaagcctggccaaagttcgcaatgcgctgctgctggcgctgctgacgaccgtcgccgcctacctgattatgatggtggcccccttccccgggatccgccagatggcggtgttcgctgccgtggggctgagcgcctcctgcctgacggtgattttctggcatccgtggttgtgccggggtttgccggtgcgcccggttccctttatggtcctgatgctgcgctggctggccgcctggcgacgcagtaaaaaactgtcaattggtcttcccgtcgcgctggcgctggtctccgccgtgggaataagcacgctgaaggtggacgacgacatcgcccagctgcaggcgttgccgaaagatattctggcgcaggagaaggccattaccgccctgaccggacagagcgtggatcagaaatggtttgtggttcatggcgcttcgcctcagcaaacgctggagcggctggaagcctttaccccggcgctggcagaggcgcagaaagcgggagaaattacccgctggcgcaccctgccgctgaactcgctggcccgtcagaaaagcgatcttacgctgctgcaaaacgccgcgcctgcggtaacgaacgtgctgaaaagcgcagggctcaacgccgtctccccgaatctggacgccatgccggtcagcgtggacgcgtggcttaaaagcccggccagcgaaggctggcgtctgctctggctgaccctgcccgacggtcaaagcggcgtgctcgtgccggtggacggcgtaaaaaacagcgcggccctcggcgagctggccgcgcgccatgacggtgtcgtctgggtcgatcgcaaagccagttttgacaccctgtttgccctctaccgcacgctgctgacggggctcctgtttgccgcgctggcggtgattgcctgcggggcgatggtgcgcctcggctggcgtaaggggctgataagcctggtgccgtccgtgctgtcgctgagctgcgggctggcggtactggccgcaacgggccacccggtaaacctgttttcactgctggcgctggtgctggtgctcggcattggcattaactacacgctgtttttcagcaacccgcgcggcacgccgctgacctcgatgctggcgattacgctggcgatgatgaccacgctgctgacgctgggcatgctcgtcttcagcgccacgcaggccattagcagctttggtatcgtgctggtgagcggtatttttaccgccttcctgctggcgccgctggcgatgccggataagaaagagagaaaacgtaaatgaacgctttttaccgcgccgtcgcgctaaccgcggcgctgctgctggcaggctgcagccattcgaccgatacccaagagacgcgtccccaggcctggctccagccgggaacccgcgttacgctcccgccgcccggcattagcccggcggtaagctcccagcagctgctgaccggcagctttaacgggcaaacgcagtccctgctggtgatgctcaacgcggatgcgcataaaatgacgctggccgggctctcttccgtgggcattcgtctgttcctggcgacgtacgatgagagcggtattcataccgagcagtcgatcgttgtgccgcagttgccgcccgccagccaggtgctggccgacgtgatgctcagccactggccgattagcgcctggcagccgcagttgccgaagggctggacgctgactgacacgggcgatcggcgcgaactgcgtaacgccagcggcaagctggtgacggagattgtctacctgcagcgtaaaggcaagcgcgagccgatcagcatcgagcaacacgtttttaaataccacatcaccattcaatatctgggtgactgagatgatttatatttccgctgttggcatggtcaacgcgctgggcaactcgcatgatgaaatcgctgctaacctggtgacgggcctagcgccgggtatgcatgcccgaaccggctggttacagggttcacccgacgccgtgctgggcggtgtggaaggcgaactgccgcccattccggaaacgctgtccgcacaccgcacccgcaacaaccagcttctgctggccgcgctggcgcagattcagtcgaccgtcgacgaggctatcgcccgcgtcggccgcgatcgggtggccgtggtgctggggaccagcacctctgggctggatgaaggcgatgagcacgtgcagcgcatgacccatggcgaagcgagcacacactggcagtacccgcagcaggagctcggcgatccgtcccgcttcctcgccaactggcttcagctcgaaggcccggcctatacgatctcgacagcctgctcttccagcgcgcgggcgatgatcggcggcaaacgtctgattgaagccgggctggtggacatcgccattgttggcggagcagataccctgagccggatgcccgtcaacgggtttaacagccttgaatccttctcccctacgctctgcgagccttttggtcgcgaccgtcgggggatcaccatcggtgaagccgccgcgctgatggtgcttagccgtgagcccgcggacgtggcgctgctcgggacgggggaatccagcgatgcgtaccatatctccgctccgcatccgcagggcgaaggggcgatcagggccatcacgcaggcgctcaacgaagcgggtatgcagcccggagatatcggctacatcaacctgcacggcacggccacgccgcttaacgatcagattgaatcgcaggtggtacacgatctctttggggaaagcgtgccctgtagctctaccaaacaccttaccggccatacgctgggcgctgccggtatcaccgaagcggccctgagctggctgattctgacgcgcgatctgcccttaccgccgcaggacttcgcccgctacgcaccggacgacacgctggcgccgtgcggtctgctgcaccagcgcaccgcgctgacaaagccggtcattctgtctaactcgttcgcgtttggcggcaacaacgccagcattctgctggggagagcgtcatgagctacttatcacccgaagcctatttgccgcacgatgcgcccatgatgctgctggagtccgttgagaatgtgacggacgacatggcggtatgccgcgtcgcgatagacagacaaagcgtgctggcaccatttctgaatgccgatggcgacctgccgggctggtacgcgctcgagctgatggcgcagaccgtcggcgtctggtccggctggcatcgccagcagcaggggcaggagcatattgcgctgggcatggtgctcggcgcgcgtgaactgatctgcgccagcgggcgtttcgccgcaggcttgacgctggacatcaccgttaagctgctgatgcaggacgaacgcttcggcagttttgaatgcgcaatttccgctaatgaagagacgctggccacgggccgggtcaacaccttccagccaagcgcagaagaattaacctcgctttttaatcagggatctaacgcatgagtcgttccgtactggtcaccggggccagcaaaggcatagggcgcgccatcgcccgacagcttgccgccgacgggtttaccgtaggcgtgcattaccatcgtgatgccgcaggcgcgcaggagacgctggacaccatcacgcaggcgggcggcaacggccgtttactctcgtttgatgtgggcaaccgcgaacagtgccgcgaggtgctggaacaggacattgaagcccatggcgcatggtatggcgtggtcagcaacgcgggtatcacccgcgatggcgcctttccggcattgagtgaagacgactgggacagcgtgatccacaccaatctcgacagtttttataacgtcattcacccctgcattatgccgatgattggcacccgtaaagggggacgcattatcaccctatcgtccgtgtccggcgtgatgggtaaccgcgggcaggtgaactacagcgcggcaaaagcgggcattatcggtgccaccaaagcgctggcgattgagctggcaaaacgcaaaatcaccgtgaactgcattgcgccggggctgattgataccggaatgattgaaatggaagaggccgcgctgaaagaagcgatgtccatcattccaatgaaacgcatgggccaggctgaggaggtcgccgggctggcaagctatctgatgtcagatattgcgggttacgtcacccgccaggtcatttccattaacggaggaatgctatgacgcgtcgcgtggtgattacgggcatgggcggcgtgaccgcctttggcgaaaactggcaatccgtgtccagcaggctgctggcgtatgaaaacgcggtgcgtaaaatgccggagtggcaggtctatgatggcctgcacaccctgctgggcgcgccgattgatgacttcacgctgccggaacattatacccgcaaacggatccgcgccatgggccgcgtgtcgttgatgtcgacccgcgccaccgagctggcgctggagcaggcggggctgattggcgaggcggtgctcaccaatgggcaaacgggtatcgcgtatggctcatccacaggcagtaccgggcccgtcagcgaattcgccactatgctcaccgaaaagcacaccaataacatcaccggcacaacctacgtgcagatgatgccgcacaccaccgcggtgaataccggactgttctttggattacgtggccgcgtcatcccgacctcaagcgcctgtacgtccggcagccaggcaattggctacgcctgggaggcgattcgccacggctatcagaccgttatggttgcggggggcgctgaggagctgtgcccgtctgaagcggcggtgtttgacacgctgtttgccaccagccagcgtaacgatgaacccaaaaccaccccttcgccatttgatacgcagcgcgatggtctggtgattggggaaggcgcgggcaccctgatactcgaagagctggagcatgccaaagcgcgcggagccactatctacggcgaaatcgtgggctttgccactaactgtgatgcggcccatatcacccagcctcagcgtgaaaccatgcagatttgtatggagcagtcgctggccatggcgggattaagcgccctggatatggggtatatctccgcacacggtactgccaccgatcgcggtgatattgctgaaagccaggccactgccgctatctatggtgacaacgtgccgatttcatcgctgaagagctattttggccacacgctcggagcctgcggcgcgctggaagcgtggatgagtttacagatgatgcgtgaaggctggtttgccccgacactcaatttaaggcaaccggatgagcaatgtggtgctttagattatattatgggagaagcccgccagatcgattgcgagtacctgcagagcaataacttcgcgtttggcggcatcaacacctcgattatcattaaacgctgggcgtaactatgtaccagtttgtactgggaaaaatatccaccctttgcgcggacccgctggcgtcaacgttcgcagacagcgcacctcagggtgctcgcaatgcctcatggctggctggcaggatgctgctcgccagagcgttatcccctcatctgctccccgacattatttacggcgagcaggggaaaccggcctttgcggagggccatccgctgtggttcaacctgagccacagcggtgacgatatcgccttgctgatgagcgatgaaggcgaagtcggctgtgatatcgaagtgattcgccccaggaagaactggcaggcgttagcgaatgccgtcttcagcatgacggagcatgatgagcttgagcgcgaagcgccagaggaacggcttgccgccttctggcgtatctggacgcgaaaagaggcgatcatcaaacagcgtggcggtagcgcctggcagattgtcagcattgacagcacggcgccgtcgcactcggtcagccaggtgcagatcggctcactcagcctggccgtttgtacgtcgaccccttacaccctgaccaccgagtcgattatccacgtcggggcaggaaaatcaccagtacacccaacataataaacacgacgccgaccagcccgtgccaggagaagctttctccccagcccggcagcaggatcgcggcgccccacaccaggatatagctaaggctcagcaaggcatacgctttgctgagcgccatgcgatgcagcgccaggtaccagctgcccatagaagccacataccccatcaaccccagcagcagcgcgcccgtaccggacgagacgtgccacagcgcggaaataaacgtcagaagctcgctgaccggaggcagagcctgcatggcatcgcgcagcaacagctgcgcggcgctgactaacagcacgctgcataaggcccagaacgcccctttcacaggctccctcccaggataataatcccaatgatgatcaaccccacccccagccagtgatgcaaggcgacgttttcacgccagaataccttcgccgccagcgtcacccagacaaaattgaggctcagcatggggtaggcaatgccgacaggcaggcgctgcagcaccaccagccagaccagcatcccgctgccaagggccaacagtgccaggccaagccacagcgcgatatgcacgccacgccgcccggctttcgccggacgggtagcctgtttctggcacagctgtcctgcacagctgagcaggcttgccagtatcagccagatccaggtcatcacttcggcagatactgcaggtaggccagacggccctggatatacaggctgtccggttctggcagattcgcccgcgaaaggtcatcgcgttttgacagcaggataaccagcgatacgcgtccctgctgacggtgctcagccagccactgcgcgaagtcatctttaccgacaaaacgatctttcacatcaggataatccagcccgtagcgcagttcgccactctgaccaaacagcgtgatgtcattgcgcttcagctcccacgccaggcccgcggccaggcccacgttattggccaagacaaatcggctgtcctgaagcggctcgcgcacggtgtcgaccagcgactgcggctgtttggaatccaccaccaggttaggaatggcaaaaccgatcagcagcgccaggcccgcagggcagagcgccgcaagccaccagcgctgctgactctgcctgaacgtaaaccagccgaccgcggcccagatgaggaacgcgaccaccgcgcagaacactttatacagttcaaccgaggaccagaccggatgcttagccagcccccacggagagaccaccagcgccgccaccatgccgataacgccaaacgccaggttgatcccgccgttaatgcgtaacgctctggcacccttctccgccgcgaggcaggcatagcgcgccatcaggatcgccagcggggcaaagcacggcaggatataggtcggcagcttgcctttggcgatgctgaagaacagcagcggcatcaccacccaacccagcagatagaacccgccgcccgcgttttgtctgtcattccatccgagacgaaacgcaccgggcagcagcgccagccacggcaggctacccgcgatcaggaacggcacgtagtaccagaacggggctttgtgctgcgcgtcgctctgggcgaaacgctgaatatgctcaacccagaagaagtaacgccagaagtcaggctcacgctgcgcaatcgccagcccccatggcagaacaatcagcacgcagctcaggatcgcgagccagccaaaaatcagcacctctttccagcgcttctgggcgatcacccacggcagcacgccaatcaccggtaccgccagcgccaggaagcctttggtcatcacccccatcccgcaggccagcccaagcagcacatagccgcccgcttttccggcaacggtttgggcctgtgacgccagccagaagctgcacatcgccgccaccagccacagggtgatgatgggatccagcaccgcatacgtgccgatgccatacaccaggaacagggtcaggaagatcaggccggagaaaatggctgtccgcttatcccgccagagacgccaggccatccagatgaccagcagcgccgctaaaccggtggagaagatagacccggcgcgcacggcgaggttcgtgtgcccgaacagcatctgcccgatgctgttgatccagtagccggcaatcggcttttcaaagtaacgcagccccaaaaaatgcgggacaacccagtctccggaggccagcatttcgcggctgatttccgcatagcgcgtttcatcaggctgccaaagcaggcggatatcaaccgggatgaggtagtaaacgataaacagtgcgagaagcgctaagccataacgggctgttttcattggaccggactcacggtttgttgatagccaagccagccttcccggccagccagttcattgcggaccactttgcccacgggcagggtgctgaggtcgtctggcagcagctcgcttaacgggcaaaacgcaatgccctcctgagcggccatcgtcagcagttcgtcgaaatcatgctgatacgcaatcccttccacttcggcatggatggtatacaccggcgtaccggcgtcacgatgaatgcggtccaggatgtagcgattgaactcatcagctttcacctcgcgcccgaccacttcatcccaggtgggaagcgtgaccggaatttgcaccgtaccgtagcgattttcgcccaacagcggcaaaaagggcccggttccgcggcaatcgctgttgtagcgaaacgcaaaggcttctttggccttcacgacgcgctgatccgcacgccatcccgccacggcggagcagcgcacgggctggccgataatggcctccagctccagcatcccacgctcgacctcacgggacaggcgcgggatatcccagacgcccgcccaggcttgccaggcatggtgatcccaggcgtgcagacccacctcatgatgctgcgccgcttcacggataaccgcttcattacccgcgccgatgcgtctgccgggccaggcggtgccggccagcaaaatatcccagccgtagagggatgctgcgcgcgagcgcagcattttgaacagaaatgccggtttaaccagacgccataaatggcgtcccatgttgtcaggccccacgctgaagaaaatgctggagcgcacgccgtgcttgctcagcagttccagcagtttgggtacgccgtcacgcgttcccctgaaggtgtcgacatcaatgcgtaaaccgacttttttcatgagacctgttccgacagctccacggtgcgcaggaagaaatcaagcgtttcatcaatggtctgttccatcttcaccgtcggcgtccagttcaggcagcgcttcgcattgcgaatgcttggcttacggtgctcaacgtcctgataccctttaccgtagtagctgctgctttccacttcgcggaagccggcaaacggcgggaatttatcgcgcagcggatgacgctcaaagctggccagcagcatctcggccagttcgcgaatgctcgcttcgttgtccgggttgccgatgttaatgatttcaccgttgcagcgattatctttgttttcgatgatgcggaacagcgcttcgataccgtcgctgatatccgtaaagcagcgtttctgtttcccgccttcgataagcttgattggcgagccttccaccaggttcaggatcagctgggtgatcgcacgggagctgccgatacgcgccgcgttcaggttgtccagacgcggacccatccagttgaacggacggaacagggtaaagcgcaggccctctttctcaccgtaggcccaaatcacgcggtccagcagctgtttggagacggagtaaatccagcgctgtttgttgatcggcccgaccaccaggttggaggtgtcttcatcgaagttcttatcggtacacatgccgtacacttcagaggtggacgggaagatgatgcgcttgtcgtatttcacgcagtcgcggatgatcttcaggttctcttcgaagtccagctcgaacacgcgcagcgggttacgggtgtactcgattggcgtggcaatagcgaccagcggcagcaccacgtcgcattttttaatgtggtattcaatccactcggagtggatgctgatatccccttccacgaagtggaagcgcgggttgtcgaggaaacggctgatcgcatccgcgccaatatccaggccgtagatttcgtagttatcgtctttgagcagacgttcggtcaggtggttaccgataaaaccgttcacgccgaggatcagcacgcgggtacggcgtttgatggccaccaccggcgcgctggtgatcagcgccccggccaccagccccagcgactgcgccagctgggtgccctgaacgtacaggccgttgtcggtttggccggtaacgatctccagcgcctgctcgccgcagctcacaatcagcggggagacggagacgacggtgcccggttttgccgccggaatgtcgtcacgcacgcgggatttccagacgatgaacttgctgacgcccgcaaagctgtaggcgcccggccacgggtcggtcacggcgcgcaccaggttgtgcagctggcgggccggtttgttccagtccagacgaccatcttccggcgcgcggcggccaaagcagcttgccttgctctcgtcctgcgcggtctcgctgaaggtgccgttaaggatgcccggcagcgcatcgcgcagcagcgtctgtgccgtcgcgttcagcttttgatgcagctgcagcgcggtatcgtccgcatcaatagcgaccttctgctgcgccacgatagcgcccgcatccgcacggcgcaccatgcggtgcagcgtcacgcccgtttccgtttcaccgttcaccagcacccagtttagcggggcgcggccacggtaggcaggcagcagagaaccgtgaagattaaaggcgcctttcgcggccaggcctaagatctcgtcggagagcaggttgcgatagtagaacgagaagatgacgtcaggcgcgagggcgcggatgcgctccacccacagcgggtggttgacatcgtctggcgcataaaccggaattccacgctcggcggcgatacgcgccacggagccgaaaaagttattctctccagccatgtccggatgggtaaagattgccgcaatgtcatagcccgcttccagcagggcctgcgtgcccgtgcaccccatatcgtgataggcaaatacaacagctttcatgggttaatttcctcttgagatgctttgtgttcctgacggacaacacgttgaataaagtagcgcggacgcgcgcgaacgtcgttatagattcggccaatgtattcaccgaggagccccatcccgacaaactgggcgccgatgaacataaacagcacggcaaagagcatgaagaccccttccgccgcccactgcgggccaaagaccaggcgcagcaccaccagcagaacggacagcgcgaaaccggccacggcgatgatgctgccgaacacgctcagcagacgcagcggcgtggtggtcaggcaggtgatgaggtcgtacatcaggttgatgaggcgcataaagctgtacttcgactccccgtgctcgcgctcggcgtgcaggaccgggatttccgttgccttacgggcaaaggtattcgccagaatcggaatgaaggtgctgcgctcatggcaatgcagcatggcgtcgacgatatggcggcggtaggcgcgcagcatgcagccgtaatcgcccatcgctttaccggtcgtacgctggatcagacggttgatggtgcgcgaggccagcttgcggaacaggctgtcctggcggttctgacggaccgtgccgaccacgtcatagccttcgtcggctttggccaccaggcgcgggatctcttccggcgggttttgcaggtctgcgtccagggtgataatcagatcgcccgtgacgtggctaaaccccgccataatcgccgagtgctggccgtagttacggttgagcagcacggcaacgatgtggctgccttcagcctgcgcggcgtcggtcatcatcagcgcggaattatcgctactgccatcatccaccagcagaatttcgtaggccttgcccatcgtgtcgcaggcggccgttgtacggcggatcagttcgggcaggctctcctgctcgttataaaccgggatgaccacggatactttttgtacaggcggtgcactgaacatatcaatgtcctgcaagctgatggagtgcggtaatgacgcgggttgtgtcgtcatgagtcatgtccgggaaaagagggagagaacaaatacgcgcgctattccattcagaattcgggagcgatacatcaggaaaacgctcgcggtagtatttttgcgtgtgggccgcgcggaaatggaggccggtaccgatgcctttctctttcagcgccgccatcagggtgtcgcgtgagatcccgcagcgcgcttcatccacgcgaataataaacaggtgccaggcgtgcacgtgcggccatgatggaatggtgagcggctggaacggcgtatcggcaagctcccgcaggtagcgttgtgctatttcctcacggcgcctgttggcctctttcagtttgcctaactgcaccagcgccagcgcggcgttgatgtccgccaggttgtatttatagcccggcgcgatcacttccgcctgcggcgcgcgaccgtgcgtctggcgatcataggcatctacgcccaggccatggaatttcagactgcggatccgctgtgccagctgcgcgttatcggtgaccaccaggccgccttccgcgcaggtcatgtttttaatggcgtggaaggagaaaattgccgttcctttccagcccacgtgacggtttttgtaatacgttccggcggcatgggccgcatcttcaatcaccggaataccgtgacgttcaccgatggcatggatagcgtcgatatcacacggcgcgccggcatagtgaacgggaataatagctttagtgcgcggggtaatagcggcttccacggcttctggcgtcaccattaatgtgtctttatccacatcaatcatgaccggcgtggcgcccagcaatacgatcatattcagcgtggagacccaggtctgggaaggggtaataacttcatcgcccgggccaatatccagcgccatcagcgtaacgtgcatgcccgcggtggcggaacagagggcaatcgcatgctgattcccggtaagttgacagaatgcctcttcaagttgctgattcttaggccctgtggtgatccagcccgacatcaaaacgtcctgaagcgccgcaatttcctcagcgcccatcgacggccgcgaaaaaggcagaaaatcactcattattaatttccttgcaatcaaaatggcatgtttttgatattaaccaaatgccagcccgcttatttcaacgaaccataaactcatatcaaagtagctctctttccttagggaaaaattaagacaacgtttacaacgttataagacaactagcagccaattgaaaaacaacaagttaattttatattaaatatttttgatgtgatcttccgcaacattttgaaatggaaacatttaaaccaatcctcaacaaacaaaaaaaatcccggctatttcaaaataatatgaaatagccgggaacttttctatttagttaattgtcgcgcttattacaggttatctggaaagtttttcggtaattcactggccgcacaggcgatcacgctttcattattggcaccgcagtcgcgtacaaaggtgattgtggcaaattcatcaatcacttccgttggatacgccgggcccgcatctcggtagctgttcatcagcggaatatgatcgttctggaagcagacggttttttccgggttgttcatgacccagcgcgggaagaagatggtgccgtggaacagtttgtcgcccaggttcagaatcaggctgacgtcggtaccggttggctcggtccaggaaattttatagatgctttcccctacccgcacgatgtaagcctgctgatctttcacccaacggttggccaccagaccgctgtgaatacggtaatccagggtcgtctcgtttttgacgtaaatctcgtagttccagccgttgtcgtaggtgtaaacaaggtgtttgccaacgaagccgcttaagtcgtgtttgtcgaaggtgttcataagatgtctcctttgttttgatgagacgatcgtaccccttcaaaaaatgaatgaataacgctatgttttaatcaaattcatccaaattttagataaattatgcataaaacgacgctggaacaatggtctttactggaaagagtggtcgaggcgggcagctttgccaaagccgcagaagaaacccaccgcagccagtcttcggtgagctataacctgtcgctgctgcaggagctgctgggcgtggccctcctggtgccggaaggacgacgggcggtgttaacgccggcaggagaactgctgctcaaccaggttaaaccgctgctgaaagccttttcgtacgttgagacgcgcgcagcgacccttcgcaacgggatgcgcacgcggctggatctggtggtggattccattttcccccgccgccgcctgtttgccattctgcgccagttccagcagcagtatccgcaaacccaggtacgcctcaccgaggtgctggaaaacacccggaacgatgccattaacgacgaagccgatgtgatggttctcacccgccgccaggacatgaccgggctcggcgaatggctgatgaatatcgactttgttgccgtggcccaccatcagcatcctctctttcacctcgacgcgccgcttaacgacgacatgctacgcccgtggccgctcattcagattgcggacagccagcccgccgcgcgcgcggccggtgagtcatggaccttctccaccatcgatgccgccattgaggccgtcctctctcaggtcggctacggctggctgccggaggaacgcatccagacccagctggatcaaggcatcctgaaacgcctgccgctgagccacggtgcacgcagagcgacgccgcttcacctgattgttaagcgctccctcgccccgcttgacgagcaggtggagacgctgctgcgcctttttagccaggagccgtcatcctcacctgctacgctttaaggtccgaacgttaaaacgataaggagcggatgatgaaaatcgactttacggggaaagtggcgctggtgaccgcctcaaccggcgggatcgggttcgccatcgccagagggctggcagaaagcggtgccgaggtgatcgtcaatggccgcagcacggaatcggtgaataaaggcattcagcagctgcagcaggtggtgccgggcgtgcaggtgcgcgccgcgattgccgatctcagcacggcggaaggggtcgagtcgctgctgaaggtggcgaataacgtcgatattctggttaacaacgccgggatttacggcccgcaggatttctatgccaccgacgatgagacctgggagcgttactggcagaccaacgtgatgtccggcgcgcgtctttcccgcgccctcctgccgggcatggtgcaaaagggctggggacgggtggtgtttatctcctccgagtcggcctgcaatatcccggcggatatgatccactacggcgtgaccaaaacggcgcagctctcgctggcgcgcgggctggcgaagttcgtggcgggaagcggcgtgacggtcaacagcgtactgccggggccaacaatgtcggacggtttcgcagagatgatgaaggatgaaatcgaaaaaaccggtaaatcgctggagcagctggcgaaagagtttgtgatggccaaccgccccagctcggtgatccagcgcgcggccacggtagaagaggtggccaatatggtgatttatgtctgttcgccccaggcttccgccacctcgggcgcggcgctgcgcgtcgatggcggcgtggtagatgacatcatctgaggctgtcaggccgcactgcctgcaacccgacgggcagtaatgtagtgcgcctgccagtaagcatccgtcagggttgagaccgtgacgccctggctgcttgaggcatgaataaactcgctattgccaatatacacgccgacatgcctgcggttcggacccgtctggaagaacaccagatctccgggcctcaggcggtattgcgtcacctgcaccccgcggtggatctgctcgccggtcgtgcgcggtaagttaagatgcgctacatcgctgaaaaggtgctgcatcagcgcggagcagtccaccccccggcgcgtggttccgccccactgatactgggtccccttccacttttggtattgatcaaggatgcgcgcgcgcagcgggcccgtatcctgttgcatcagtgcagatttcgctggcgagacggccaggccactgttcatcgatagcatcgacgcggggagttgaaaactgaatgcagaaaacgaagcaaaacttaacgtcaggattgaaataaacgatctaagagtcatatcaagaaagcagtagtgagtgagtttttccttacctgtgggggccaaagggttcccctgaatatcgtgcgatgtggcgataatatagacagatcgttttttcaccaattcttatcgaggccaaaaatggactcactttgagatcgcaagatcgagaaaaaaatggtggtgatgtaaggactgtcctggtaaagcaggtaaactgatccacagaatgtgtatttcagctaagacgtatttatgaccaatatgattgccgacgagacggtggcgaaatccagcgtgctctctgtctttgactttgatgggacgttaacacaccacgacagctttattcctttcctgcgctttgccttcgggaaacgctacttcgcgggccgtctggtgcgtatggcgctgcctacgctccactgcgtgcgtcgcaagctgacgcgcgatgagctaaaggaagtgctgatcaaaacgttcctgacgggcgtggatgaacactggttgcgccagcaggcggaagcgttttgcgaaaaatactggagcaagctgatgcgccccgaaggggttctggccgtggcggccgaggtgaattccggtgcggaggtgaccatctgttccgcgtctccggcgctggtgctccagccgtgggctgacaaactgggcattaagctgattggcacgcagctggaagtgaaagacggcaagctgacggggcgcatcacgggccataactgccgctgcgcccagaaggtggccaggctggaaaaagtgtatggcgatctgaacgcctatcacctgcgcgcctggggagacacccgcggcgaccacgagctgctggcggcggcgcaggatccgcactggcggcacttccacccgccgcgcaagcgccgcaattcacccatcaagtagcctttttgccgggtggcggctgcgccttacccggcctacattcgaactgtaggcccggtaagcgaagcgccaccgggcggtacatcaggcttctcgtttccccgggaacatcacgctcgcaacaattcccagcgccagcacgcccaataccacaaacaggctggcggtcgcgccaatgctgtaaccgtgatgccagaagtgatcggtggcatttaaccccagcttgaacgccacgaagaacagcagcagcaccaccgctttctcgagatgcaccagatactgcttcagcgcttccagcacgaagtaaagggtacgcaggccgagaatagcgaacatcatggcgctgtagataatcagcggctcgcggctgacggcgataatggccggcacggagtcaaacgcgaacatcacgtctgagagttccaccaccgccacgcagagcagcagcggggtcgcatagcgcttcgccttcttcacgcgcccaaccatcacgtcctggttttccggcttttcaagctccgcatccacctctttctgcgtcagaataaaggcgttgctgctgattttcggccagaccggatagaagcgtttcaccaggcgataggcgagatgacccgagtaatcttccacttcgtcactctcttcattgcgtcggagcatcattaccgccgtccagccgacgaccagcgcgaaaatcacttcgacgtagggccccagacttaacaggctggtgccgatagccacgaaaataccgcggaagacaatcgcccccagcacgccccagtagagcacgcggtgacggtacttatccggcacgccgaaccaggcgaagatcgccatcatcacaaacaggttatcgacggagagcacctcctccagcgcataaccggtgaggaacaggctcgccatctcggcgccatgatgaacgtacaggaacccggcgaaggccatcgccatcatgacccagaagagggaccacattgcggcgcttttcagcgagatcggtttatcgtgacggtgcataaagaggtcgataaacatcgccccaacggccatcactacaaagacaacaacggtttccgtcgggaaaccgagatgagcagcagacatacaaaacccttttatagaggcaaagcacagcaccatgcaggctggcgtaaaccagcagagaaaaagggtgggctgtttatcatctccaccctcaaaaccgcagcgcgacggccgcgtaaggggtgtactttaccttaccagatggggattgcacatctaccgtttaggcgctcatgccacgcaaacgctgcagcactgcgaccagaaccgccacagaccagcctaccatcaacgcgcccaccagtccttccaccccgccgatgagccgccagtgctgaggtaacgtgacgtcgccgtaccctaccgtcgcatagctgaccagtgaaaagtagaagctggtgttccagtcattaaacgcgtcgatgacaaaataaaaggctgcaaacagcccggcctccaggagatgggcgaaaatcatagagatcacgataccgacattgcgtaaaacaatgcgtaccgcagaatcgacgtctaacgtgatgaattttaaaacgccaaacatccacagcgaatgaatgaccacggttagggtaagcaaaataataatgctgagtagctgcatggtacgtgctctgaccaaaagggatatggccccgcgagcgcggcggggcatctggtcgaagcttagttgaatggagagcaaaagttggtgcaataattgcgttacgtgattatttctctgccggcacgtcctgcttgcggctggtcagcagccttgagcgatatccgcagcgcactatctgtgagtcacctcttatttacatcatttaaaccttccattaactggataaaaagaacgcgccgtcgctatagtggttttgtttaataaaactaagttgtacctaataaaacaaagaacacaccctgcgaggatacaatgacagaacatttacgtaacggcgcgaccgccaccgaggacatagaaagagagacgatgcggaaggtgatctggcgtattcttccgtttctgattgtcagttacctggtctccattatcgatcgcgggaatatcggcatggcttcgctgcagatgaatgaggaccttggcctcagcaaagcggcgtttggcttcgccagcagcctttacttcgtggcctatttcctgtttgaggtgccgagcaacctggccatgcagaaagtcggcgcccggctgtggatcccgcgcattatgatcagctggggcatcgtctccatgggcatggcgctggttcaaaataccacgtcgctctatatcgtccgttttctcctcggggcagcggaagcaggcttcttccccggcgtcgtgctgtatctgacctggtggatccctgcccgctaccgcgcgcgcattattgcgtcctttatggttgccatcccgctcgctaacttcatcggctccccgctttccggattgatactgtcgctggatggctggctgggtcttcgcggctggcatctgctgttcattattgaaggcttacctgcggtgctgctgggtattgcggcctggtttattctccgggatcgccctcatcaggcgaaatggctcagcgatgaacagaaaaagtggctggaaaccacccttgagaccgagcgtagccagcaaaagaacattggacaccagacgacgtggcagctgctgaagcatcgccaaatctggctgatggcgctgatttacgcgggcgcatcgtccgcgggcaccacgatcagcgtctggtctcctcaactgctgaaatccttccatctcgataatcttgagacaggtctgtttaacgctatcccttacggtctggcatcggttctgatgattgtctggggacgacactccgatcgcaccaacgaacgccgctggcataccgcgctgacgctgttcatgattgccgccggcgtgttcgctgcctttgtaaacgtctcgctctttgccactctcgcgatcctgagcattatcctgacaggtgcgtatgctgcgaaagggcctttctgggcgctggcatccggctggatgagcagctcctcggcggcggcagggctggccgcgattggcgccatcgcgaacctgattggcggggtggtcatggtaaatgcctacggcataatcagcgagcagacgggcagctacacgctggctatgcttccgctggccgtgctgtgtctggccgggggtatcgcggtactcattatgggacggcaggcccgcaacgcccagctacacgaaaaacaggtcacgcattcgtgatgacagaagcgggacacatgtcccgcttctgcgtttaaagattttcttccgccgcgtcgctcgtttcaccaaagaactgctgacagaagggcttactggctcccattttctgcgacagacggctggccgccgccttcatcaacgggcctatctccttctcacgacgatcttccgtcagccgtgagatggggccggtcagggctaacgccgcaaccagcttgtcgtgaacgccgaagacaggcatcgcaaacgccgcggtgtggggatcgcgtgcgcctgacgtgtagaaagggagttcagcgtcgccctccggcaggctctcattgagcccccagtggcgcaagaccttactgatggccgaattatcgagcgggaactggctgccgggaagattactgtgtcgcaggccgtgcgacgcttcagcgcgaaacaggcaaaggcgctgcccgccctccagcacataccagctggcgctctcctgagacgccagggataaggcctgaagctctggctgaaccacccgcgaaagatggaaagattgttcatacagcttgccgaggtaaagcagacgtgggccaagcgcataattgccgtcttcatgcctgacgacgtaattcatccgttcaagagaattcatcaagcggtaaaccgtggttttgtgataacccgacagctgtgccagcgcggtcagcgtcaggctctcctctccaggacggaagcaatccagtaaagccagcgctttttcaaccgctacaacgccttcattccccatcattatctccttgttagcccggcagtgagtgtacctcaaattttgtgagtcacttcgtgtttacatcacaaacgccacctcgggtctggctaaaaggaaagcaacaccgctatagttgttttgttctgtacacctgcgttgtactaagtaaaacaatatggaggcattcatgtccgtttctgaaaaaaaaccgattaatcgccagttcgaacgcgtttctgccgaggacgttcgtcgggctgccgagtatcaggccgccattctggccgacgtggccggtcgccgcggtacgcttcacggccgcatcaaaccggtggctcctcacatgtccgttgcgggtccggccatcaccgtggaagtccgtccgggtgataatctggcgattcatgccgcgatggcggttgcgcaacccggcgatgtcctgatcgtcgatggcaaaggcgacctgagctgcgcgctgctgggcgaaatcatggccactcaggctcaggcgagcggcattgcgggcatcattattgacggtgctgtacgtgacgccgattccctgagcaaaggtcactaccctgtcttttctgccggtctgaacccctgcggcccgacaaagttaatttctggccgggttaatcatcccatttcagtcgccggggcgacggttcaggccggggatctggttgtcgcggatatcgacggcgtggtcgtcatcccgcgtgatgaggttcagcaggtcatcgcgctggcaaaagaaaagctggagatggagacccggcgtcttgccgccatccgtgaaggcgatttgcgtccacactggctagatgacgcgcttcgtaaggcaggtatgttagccgacggggagacgctgtgatggggggcaaagacgtaattctggttaccggaagcgacctggcggagcaggccatggtgatgctgcagggctttgaggtggtgtttgctggccgccagccgacagaagatgacctgatcgcgctgtgtgaacgacacaatcccgtggcgattctggttcgttacggccggatcaccgcgaaagtcatggatgccgccccggctctgcaggttatttccaagcacggaagcgggatcgatgtgatagaccagacggcagcggccgagcgcaatatcgccgtccgcgcggccccaggcgcaaacgcggcggcagtggctgaacatacttgggcgctgatccacgcctgcgcaaagtccgtggtgccgctggacaagcggctgcgggacgggcactgggataaggcgacgcataaatccattgagctggagggattaaccctggggctaatcggattgggcgctatcggctcgcgcgtggcaactattggtcatgccttcggcatgaaggtgctggcttacgatccctatgctaaatcgatgcctgccctgtgcgaacgtgcagagacgctgaccggacttctttcccgttccgatgtcatctctttgcactgtccgctaaccgatgagaatcggggaatgatcaatagcgaggcgctcgcacactgcaaacggaacgccattctggtcaatacggcacgcggtggactgatccacagtgaatcgttactggcggcgctccgggatggcacgctgcacagcgcagcgctggacagctttacccaggagccgctgacggcgccgcatctctggcagtccgtagaaaacgtggtgatttcaccgcatatcggcggcgttaccgccgcgtcatacatcaagatggggaccgtggccgcgggcaatattctggccgtgacggacgccaccaccgtcagctcgtaaagccaagcgcgacgagtggcagcgcgctggtgtcacttgtcttctgccagcgcctgagcacacgcccaggcacttgcccaggcccactggaagttgtacccgccgagccagccggtcacgtccattacttcaccgatgaagtagagccccggcacgttgcgcgcttccatggtacgggaagagagttcattcgtgtcgactccgcccagcgtgacttccgccgtgcggtagccttccgtgccgtttggctgcacgcgccagtttgttagcatctcgaccagcgtttcctgctcgcggctgttaagctgctttagcgacacgtcggggatctgccccagcacctgcaaacattccaccagacgcttcggcagctgcattgcgagggtgtttttcaggctctgattcgggtgcgcggtacgctgctcgttgaggaaggcatccagatcgcaatcggggagcaggttaaccgtgacaaactctcccggctgccagtagctggagatttgcaggaccgccgggccggagaggccgcgatgggtaaagagcaggttttcgcgaaacaccgtgccgtcttcggcggtgataacggcgggaacggacacgccagacagcgtctgaagctgttccagaagcggtttatgcagcgtgaacggcaccagcccggcgcgcgtaggcaggactttcaggccaaactgctcggcgattttatagccgaacggggaagcgcccagccccggcatagacaggccgccgctggcaatcaccagattatcggcgctgacggtttcaccgttgagctgcagcgtgtagccctggtcatcgcgggaaacgtccagcacttcggtgcgcaggcgcatgaccacgccgcccttctcgcactcggccaccagcatatcgacaatctgctgggcggagtcgtcgcagaacagctggcccagcgtcttctcatgccatgcgataccgtgcttacccaccaggtcgataaagtcccactgggtataacgcgccagcgcagatttacaaaaatgacggttttggctcaaataggccgcgggttcaacatacaggttagtaaagttgcagcgcccgccgccggacatcaggatcttgcggcctggctttttaccgttatccagcagcagcacgcgacgacccgcctgtccggccattgccgcacaaaacatacccgccgcaccggcgccaattaccacggcatcaaacctttccacgtcaaaaccctctttgttaactgccgcggattgtaaagtttcctctgtggtcacaccagcgtaaaaagatattacaaagccattccattgaaatttaaagaatatcctttcaggcacttttctcaaatcaggtggtatgtcaaaaaaagtctatatttcactttgcccgttgcgcatttgtcctggataatgcgccgcgttcatgtcctcaaaatggcgtaacgtcctatgctacatttgtttgccggcctggatttacataccgggcttttactcttgcttgctctggtttttgtactgttttacgaagcgatcaacggcttccacgacactgcaaacgcagtagcgacggttatctacactcgcgcaatgcgatcgcagcttgcggttgttatggcggcggtatttaacttttttggtgtcctcctgggcggactgagcgttgcgtatgccattgtgcatatgctgccaacagatctgctgcttaacgtaagttctggccatggcctcgctatggtgttctcaatgctgcttgctgcaattatctggaacctcggtacctggtatttcggcctgcctgcatccagttctcacaccctcatcggcgcgattatcggtatcgggttaaccaacgccctcatgaccggtacatcggttgttgatgcgttaaatatcccgaaagtactggggatctttgcctctctcatcgtctcccctatcgtgggtctggtggtggcgggcgggctgatcttcatcctgcgtcgttactggagcaataccaaaaaacgctcccgtattcacctgacgccggcagagcgtgaaaagaaagacggcaagaaaaagccgccattctggacgcgtattgccctgatcatttccgctatcggcgtggctttctcacacggcgcgaacgatggtcagaaaggcattggtctggtgatgctggtactgatcggtgttgctccggcaggcttcgtggttaacatgaacgcctccggctacgaaatcacccgtacccgcgatgcggtcaacaacgttgaaacttatttccagcagcaccctgagctgctgaaaaaagcgaccggcgttgaccagttaatcccgtctccggaagccggtgccacgactgcacctggcgaattccactgccatccggctaacgcgattaacgcgctggaacgtgccaaaggcatgctgggcaatatcgaaagttatgacaaactgaccgttgagcagcgtggtcagctgcgtcgcattatgctgtgcatctctgatgtaacggataaagtggcgaagctgcctgacgtgaatgctgacgaccagcgtctcctgaagaaactgaaaggcgatatgctcaacaccattgagtacgcgccaatctggatcatcatggcggtcgcactggcactcggtatcggtacgatgattggctggcgccgtgtggcgaccaccatcggcgagaagatcggtaagaaaggcatgacctatgcgcagggtatgtccgcgcagatgacggcggcagtgtctatcggtctggcgagttacaccggtatgccggtatccaccacccacgtactctcctcgtccgtggcaggtaccatgattgttgacggtggcggtctgcagcgcaaaaccgtgaccaacattctgatggcctgggtgttcacccttccggcgtccatcctgctgtctggcgggctgtactggatttcgctgaagctgatttaatcggttaaaggcgacaaaaaagcgggtcaggaaactgacccgctttttttatgctcagtgccaaatcatcaatgcaatcatgctgacgacgaccagcccgcacagggcactggtcaaaatgaactgacgacgcaggcgctcgcagcgacggataaattcttcatcgtgatgatcgcggtagcgctggtagtagatatatcccaccagacgcatctgtttgctgggctgtccatgcgaggtgaagaaccctccaccgtccacatactgataaagcaacggatcgcaaccacgaagtaccactaacagcgcacgtaacgatgagaagtagcgcgccatattcactatgcaaactacgcataacgcccaaaacaatgcgacggtgctaatcatacatcctccccggcgtccgcccacgaagcaaggcttctgagctaccgcaccccaatgccctgacagacagttcagtgaaagaatgaccaaaagtcgatccggttcgcgttttaatatccgaacggctcatttaatagtgtaggagatccgttaatttttttgccacaaggttaatcgttatcaacaccaaagcttgaaaaatatgtttaactgggccgtaatgaaagcatcagacgacggctttcccatttagtcatcgataacttaaggaaggagtaacactatggcttacaaacacattctcatcgcggtagacctctcccccgagagcaaagtgctggttgataaagcggtatccatggcacgtccctacaacgcgaaagtttcgctgattcacgttgatgtgaattactccgacctttacaccggtctgatcgacgtcaatctgggcgatatgcagaagcgtatctccgaagagacgcaccacgccctgagcgaactgtccaccaacgcgggctacccgattaccgaaaccctgagcggcagcggcgacctgggccaggtgctggtagatgcgatcaagaaatacgacatggacctggtggtgtgcggtcaccaccaggacttctggagcaagctgatgtcttccgctcgccagctgattaataccgttcacgtggatatgctgattgttccgctgcgtgacgaagaagacgagtaagtgcaaaaaagcccggtggcgctaacgcttaccgggcctacaggcggcccgaaatgtaggccgggtaaggcgaagccgccacccggcttttttattccggtgtccccgaataaatatcaaaccggtgccctttggtggtcaccgcattggtcgtggcaacgtccgccaggggcggcgcatagtcagggcgcttcaccaccacccgcttcgtcgcgagctgacgagccggttccagcaggccatccgcatccagatcaggccccaccagagactgaaacacccgcatctctttcttcaccagcgcgcttttctgcttgtgcgggaacatcgggtcgagatagacgacctgcgggcgcggggtgatatcggtcagcgccgtcaggctcgaggcatggatcagctgcaatcgtacctgcaaccacggcccgatttccgggtccgcgtagccacgcgtcagaccatcgtccagcaacgcggccaccaccggattacgctccagcatccgcacatgacagccgacagacgccagcacaaacgcatcgcgccccagccccgccgtggcatccaccacgtccggcagatagcttcctttaatcccaaccgctttcgccaccgcttcgccgcgaccgccgccgaacttgcgccggtgcgccatggccccgccgacaaaatcgacaaaaatcccgccgagcttcggttcgtcgcgcttacgtaattcgagatgttctggtgtcatcaccagcgccatcaggttatcttcatcatgttccagcccccagcgggcggccagaacagataaggcgccgtctccggcgcctgtttcatccactaagcagatcttcacgtaacaatcagcctttgatcccgtaatgctcaagcatcgcgtccagctgcggctcgcgcccgcggaagcgtttgaacagcaccattggctcttcggaaccgccgcgggtcaggatgttgtcgaggaacgactggccggtttcgcggttgaaaatcccctcttcttcgaagcgcgagaaggcatccgccgccagcacgtcggcccacaggtagctgtaataacctgccgcatagccgcctgcgaagatgtggctgaacgcgtgcgggaaacgaccccaggttggcccagggatcaccgcgacctgctttttaatctccgccagggtttcaaggattttcgccccctgctccgggctgaactcggcgtgcaggcggaagtcgaacaggccgaactccagctgacgcaggataaacatcgccgcctggtagttcttcgccgccagcattttatccagcagttctttcggcagcggttcgccggtctcgtagtggccggagataaacgccagcgcgtccggctcccagcaccagttttccataaactggctcggcagctcgaccgcatcccacggcacaccgctgatgcctgccacgcctgcggtttcgatgcgggtcagcatgtggtgcaggccgtgaccgaactcgtggaacagggtgatcacttcatcgtgggtgaacagcgcaggtttgccgttcacaggacggttgaagttacaggtcaggtaggcgaccggcttctgcagggaaccgtctgctttacgcatctggcccacgcagtcgtccatccacgccccgccgcgcttgttctcacgcgcgtagagatcgaggtagaagctgccgcgcagttcgtttttctcgtcatacagctcgaagaagcgcacgtccggatgccagacgtcgatatcggtacgctctttggcggtgatgccatagatgcgttttaccacttcaaacaggccgttaacggctttgttttccgggaagtacgggcgcagctgctcgtcgctgatgctgtagaggtgctgcttctgtttttcgctgtagtaagcaatgtcccacggctgcagctcgtccacgccgaactccgctttcgcgaaggcgcgcagctgggccagctctttttcaccctgcggacgggcgcgtttcgccagatcggtcaggaagtcgagcacctgctgcggattttccgccattttggtggcgagggatttatcggcgtagttttcgaagcccagcagttgggccagctcgtggcgcagggcaaggatttccgccatgaccgggctgttgtcccacttaccggcattcggtccctgatcggaagcgcgggtgctgtaggcgcggtacatctcttcgcgaagcgcctggttgtcgcagtaggtcatcaccggcagatagcttgggatatccagggttaacaggtagccgtcctgctctttcgcttcagcctgcgcttttgctgccgccagggcgctttccggcatacccgccagctctgcttcgtcggtaatcagcttcgtccagcccatggtggcgtcgagcacattgttgctgtactggttgcccagctcggacaggcgcgcggcgatttcaccgtagcgggtctgcttctcttttggcaggccaatcccggacagctcaaaatcacgcagggcgttatcgaccgattttttctgggcggtgttcagctcggcgtagtgatcgccgtcgcgcaggtcgcggtaggctttgtagagcccttcgtgctggccgacccaagtgctgtactcagagagcagcggcagggtttgctcgtaggcttcacgcagctccgggctgttttttaccgagttcaggtggctcaccggggagaagatgcgccccagcacgtcgtccacttcggccagcggctgacacagattttcccaggtgtacggcccgccctgcgcgaccacgctttctaccgccgcgcggcagttgtccagcgattgcgtaaccgctggaaccacatgctcggggaggattttagaaaacggtggcaacgaaaaaggcgtcagtaatggattggtcataaacgctgtcctgttgaaagaggtgaatgaagcgcgcatccggcgctgtgcatatgcgatctagaatggggttaagtgtagaggatttcaatgccagacgtggcggaaaagagcccggtggcgctgcgcttaccgggcctacgggtaatctgcgccgttctgctgtaaactgtggcaaatcgtcaattcagcggaatatcattacccatgctcagttatcgccacagcttccacgcaggcaaccacgccgacgtccttaaacacaccgttcagagcctgatcatcgaatcgctcaaagagaaagaaaagccgtttctctatctggacacgcacgcgggcgcgggccgttatcagctgagcggcgagcatgccgagcgtaccggtgaatatctggaagggatcgcccgcatctggcagcaggacgacctgcctgccgagctggagccgtacatcggcgtggtgaaccacttcaaccgcaacggccagctgcgttactacccgggatccccgctgattgcccgccagctgctgcgcgagcaggacagcatccagctgaccgagctgcatccgagcgacttcccgctgctgcgttctgaattccagaaagacagccgcgcccgcgtggaaaaagccgacggctatcagcagctgaaagccaagctgccgccggtttcccgtcgcggcctggtactgatcgacccgccgtacgaaatcaaaaccgactatcaggcggtggtgaccggtatccacgaaggctacaaacgcttcgccaccgggacatacgccctgtggtatccggtggtgctgcgcgcgcaaatcaagcgcatgatcaaagacctggaagccaccggcatccgcaaaatcctgcagatcgagctggccgtgcgtccggacagcgaccagcgcggcatgaccgcctcgggcatgatcgtcattaacccgccgtggaagctcgaagcgcagatgaacaacgtgctgccgtggctgcacaaaacgctggtgccagccggtacgggtcatacctccgtcagttggatcgtgccggagtaatcgcagccatcggtggaaactattgatttcaggtatacaatcgcggcaattcacgattaaggacaaaagctatgactaagcattatgactacatcgccatcggcggtggcagcggcggcatcgcctccatcaaccgcgcggccatgtacggccagaagtgtgcgctgattgaagccaaagcgctgggcggcacctgcgtgaacgtgggttgtgtaccgaaaaaggtgatgtggcatgcggcgcaaatccgtgaagctatccatatgtatggcccagactacggctttgacaccaccatcaaccacttcgactgggacaaactgatcgccagccgtaccgcctacatcgaccgtattcacacctcgtacgacaacgtgctgggcaaaaataacgtcgacgttatccacggtttcgctcgcttcgttgatgcgaaaacgatcgaagtaaacggtgagacgatcaccgccgatcacatcctgatcgccaccggcggccgtccgagccacccgaacatcccgggcgtggaatacggcatcgactctgacggtttcttcgaactgcctgccctgcctaagcgcgttgccgtggtgggcgcgggttacatcgcggtagagctggctggcgtgattaacggtctgggcgctgaggcgcacctgttcgtgcgcaaacacgcgccgctgcgcagcttcgatccgctgatcgttgatacgctggttgaagtgatgaacaccgaaggtccaaccctgcataccaacgccgtgccaaaagcggtcgtgaaaaatgcagacggcagcctgaccctggagctggaagatggccgcagccagaccgtcgattgcctgatctgggcgattggccgtgaaccggctaacgataacttcaacctgggcgtgaccggcgtgaaaaccgacgaaaaaggctatatcgtcgtcgataaattccagaacaccagcgtaccgggcatttacgcggtcggcgacaataccggtgcggttgagctgaccccggtggccgttgcggcgggtcgtcgtctttccgagcgcctgtttaacaacaagccggacgagcatctggactacagcaacatcccgaccgtggtcttcagccacccgccaatcggcaccgtcggcttaaccgagccgcaggcgcgcgagcagtatggcgacgaccaggtgaaagtgtataaatccgcgttcaccgcgatgtataccgccgttacctcccaccgtcagccgtgccgcatgaagctggtctgcgtcggcccggaagagaagattgtcggtatccacggcattggcttcggcatggatgagatcctgcagggctttgcggtagcgctgaagatgggcgcgaccaagaaagacttcgacaacacagtggcgatccacccaacggccgccgaagagtttgtcaccatgcgttaatgcataagcccctctccggaggggctttttttattcacattcataaatcgttgcaaaacgaatgctccgaaaagagtgatctaccgcacatatccctccacatctaccgaagcgaatgtctacgcttataagacgcccggataaacctgtcttttgaacacacaaccggaggtccctatcaccatgttcaaccagaaactacaggctaccgagaacatcgaattcgagattgcagaagagctgcgctacgagaccgatccctgcgagttgaaactggatgaaatgattgaggcggagccggaacccgagatgatcgaggggctacccgcctccgatgcactgacgcccgcagaccgctatcttgaactgtttgagcacgtgcagtcctcgcgcctgttcacggacagcaaaacctttcccgactgcgcgccgaagatggatccgctggatatcctgatccgctaccgcaaggtcagacgccaccgggatttcgacctgcgccagtttgtggaaaaccacttctggctgccggagacctacagtacggaatatgtctccgaccccggtctgtccctcaaagagcacattgacagcctgtggccggtgctgacgcgcgagccgcaggatcatattccctggtcttccctgctggcgctgccccaagcctatatcgttcccggcggacgattcagcgagacctactactgggattcctatttctccatgctggggctggcggagagcggtcgtaacgatctgctgaaatgtatggcggataacttcgcctggctgattgaacgctacgggcatattcccaacggcaaccgtacctattatctcagccgctcccagccgccggtctttgcgctgatggtggagctgtttgaggaggacggcgtgcgcggtgcgaaacgctatctggaacacctcaaaatggagtacgccttctggatggacggcgcggagtcgctcctgcttattaaccaggcctaccgcagcgccgtgcgtatgccggacggctcgttgctcaaccgctactgggatgaccgtgataccccgcgcgatgaatcgtggattgaggacgtggaaactgcccgccattcgggccgtccgccaaacgaggtgtatcgcgacctgcgcgccggggcggcgtccggctgggactattcctcccgctggctgcgcgatccgtcgcggctcgccagcatccgcacgacgcagtttatccccatcgatctgaacgccttcctgtacaagctggaaagcgcaatcgccaacatctcggcgtcgaaaggggataaagagacggcagacctgttccgccagaaagccagcgatcgccgcgaggcggtgaaccgctatctgtgggacgaggagagcggctgttaccgcgactacgactggcgacgcgaagagctggcgctgttttctgccgccagcattgtgccgctgtatgtcggcatggcgacccatgagcaggccgagcgcctgtctgatgcggtcaaggcgcgactgctgacgccgggcgggattctggcgaccgagtacgaaaccggcgagcagtgggataaacccaacggctgggcgccgctgcagtggatggcgatccaggggttcaagcagtacggcaacgactcgctgggggatgaaatcgcctggagctggctgcatacggtgaaccatttttatcagacgcatcataagctgattgagaagtaccacatcgccagcagcacgccgcgcgaagggggcgggggtgagtatccgctgcaggatggtttcggctggacgaacggcgtggtgcggcggctgattgggttgtatggggagccttgaatagggtgcggtctggtgccctcaccccggccctctcccacggggagagggaggagagatcagcgaatcacctcataaatggcgctctgaatagactgccattttttggtggtggcatccggctgtgacttcgcacggcgtgtggccatgtcgagatcgtgctgctggcgtttcaccaccgctggcacggtgcagaaagctttgaggtactctttacgtaccgaggtcagagactcgccgttcgacatcgcgtggctgagcgtgttgatgaagcgccgacacggcttctcctccaccatgttttgccggtagcgtagcatcagctccagcacgtcgtcatagcctgccgacatcgcctcttcggtccaggacagcttccagtccataccgccctgcaaaaagagctgggtcacgcgggtgtcgttgcggttaatggccgagcggaaattattctcgtcccaggtcactcccatgcgcgtgagcgtttcgcgcgaggaaggcgtctcacgcatttcctgtggcggcgccgcttcagccgcgctgacggccgcaggctgcggtttactgctggtcaccagccagaagcctcccgccacgatggcaatcaccataacgccaaccgccccccataacgtaccggaaatgagctgctcgcgttgttcgggggtgcgcggcgcgcgctgggtcggcttttcaatggtgtcacggacttcaaacagatccccaccggtgacccgatccattttctgcgccttttcccagaaggtatgcagttcgctggcatctaccgccatgaatcccgccggattgacgcgcgttctcccctcttcaaacgcgcgttgaacgggccgcgcgatctgcgcgtagtagttatccagcagctggatttgcgccgagcttaacgttttctggacggtgatgttgttgcggatttgccgaatgtcatcgaggaaggtttgcagcgttttacgcggttcaaccagtagcgtcagcatggacgggtcgctgaacagcgaagcgtaatagcggctgaactcttttttatccaccagcatttgcgccagttcgctgaacatcatgccgctcaggacatcgttgatctcgcccaacttcagccagcgccgtacgcgatcggcgttaaacaaagtcttgagatggttattcagccttacctgatcgggccaggcctgctgtatgagcccttttatcatgagctctatcgcccgcacctgcttatgcgcctgctgctgctgaagttcgctgcccggagccagctccgtgctgtaggtcaacagcggctgctgcaggcgaaggtgctccagcgcggtgacaaaccgcatcgccgcaatcagctggttttcactcacatcctgtccgctttcatactgcggcacgcgctgctgcagcaggcgcagctggagcgtaaattccgacatctcggcatcattcaggttgagttttttcgctacggctccccagccgcccagggctaatcgcgcgctgtccagttgttccagaaaccagcgtggatctttgccctcagaagcatgtacattcagaagaagcaaaatttccaccgacgcatggcgaatgaccgccagacagtgttcgaactgttcgcgaatatgatgtgatgtgctgagagccattgttttccttaagcgacaacgaagacatccggattggcacgtaacggccttttttctttttatttatacgcggttaaccatacctgactttctgttgaaataaagtgacaaccctaaaatcatttaaaatgtttcaggagaatctgaatgccggttttaattacccctcgcctgaactgctcgcctttacaagaagaagactggcccttttttctggcgctacagcagcatcccgacgtcatgcgctttgtggcggaagaccgccccgtcgcggcgatccgcgaggcgtttgattcgcgcctgacgccctggacgccaggcagcgcgcactggctgtgcctcgccgtgcgtgacgccgcttccagggctccgttgggcgtcaccgggtatattcatcgggaggtggattgcgctgaggtcggttttcttttcgctcccgaggcgcaggggaaaggttacggctttgaatccctgaaagcgctttgcgattacgcttttcatcagggcggtatacgtcgacttaccgccaccgtcaccgccgggaatgtcgcctcacgacgtctgctggaaaaagcccgcttttgcctggagggcgaattacgcgagagctattaccttgcgggacgttggcataatgactggttatttggtttattgcggcaggaatatctgaataacaatccctgatcaatagccatttggcggatatttctcgtacctcatttcctctacagtgtcgccattaagaggaaatgaatatgaaagagcatgcgctgaaaatatcttctgccgccatcgcgttaataaagaaacatcagggtctttctctggaaaaatatcgtgacgaaaaaggattatgggttatcggctatggccacgttatccgcgatcaggagcattttcacggccctgtcacacctctggaggctgagactttgctgcgcgaagatatccggttgtgtgaagcgctgctgcgggaaaatatgacacgtccattaacccaacagcagcatgatgcgctggtgatgatgatattcagtttcggagagataacgtcgctcccaaacgcgctttttcaggccgtcgcccgggtataatacatggctgcctgcgttctgtttttcacgtccagccgccggaaaagcgcctcgaggtgcgcttttaccgtggccgcactgatgttcagattgcgaccaatctctttattcgactcccccgccgccagcaatttcaagacttcgcgctggcgctcgctcaaggataataatgcctgaggcgacgtcggctctctgacccactctccgggaaaacagaccatccctctggataccgaatccagtacggcggaaaaccgttcgggattggcgtttcggggaacaatggccatgacgtttcgctgccgcagctgctcagcacatttggcctcttttttcgccaaaatcagaatcacacgtatcgccggaaagcgatgcaggatcgcttccagcaaagtgctcccttcgtcctgaattaaattcccatcaatcatgacgatagccgacggtgaagcagaaatctgagtccataaatcttctgcctgacaggtcccagttatatttatttccggaatcaacctctgaagactgtgtatcgctccgtgaataaagagtgactgcctgtcaaacatgattactcgcatcgttttttcccctctgagaatagcgaagggggattctacagaggcattatttaagaaaaaactcaacgaatggatacgttacaaatccccggggttctttatatctgtcagtatttagacacatttatcttaaggatttactcaagcgcatacctcacaggaacataccgcctgatacttcaatacgttgcgcattcatccagcccagtttgtcgctgagcagtgccgcaatggcatcgccgatatcgtcaggcagccccacccgccccagcgccgtctgggacgccagcatctggttgagctccgcgttgtcgcgcacgtgtccgccgccaaagtcggtttctatcgcgccaggcgcaatgatattgacggagatgccgcgcgcgcccagctctttcgcctgataacgcgtcaacacttccattgctcctttcatcgccgcgtaggtcgccgatcccggctgggtaaaacgggccagcccgctggagacgttgaggatccgtccgccgtcgttaagcagcggcagcaggcgctgcgtcaggaagaaaggtcctttgaaatgaatgttcagcgcctcgtcaaactgggtttccgtcgtgtcggtataaggcgcatataaacccgtcacggcattgttcaataaatagtcaaacgtttcacgctgccagacgctcttaagggtctcctgaagctgttggacaaaatgctcaaagctcgtgatatccccgacgttgagctgcaatgccgccgcgttgacgcctttttcctgaatttcatgcacaacgtccagcgcttcctgctggctgcggttgtaggtcagcacaattcccgtgccgtctgccgccagctttaaggcagcgtttttacccaaaccacggctaccacccgtcactaatgcgatacgttcagtcatcataaacctcgttttggctgttatggagattgagtaagagcttattaggtgatagaaaatcaataaagatgagttaaaacgcttcactgtttcagcacaaacaacaatgagctacatctatggataaaattcacgcaatgcagctgtttgttcgcgtcgcggaactggagagtttttcccgcgcggcagaaacattaacgttgccgaaaggcagcgtgtcacgacagattcaggccctcgaaaaccggcttggcacccagctattgcaccgcaccacccgccgcgtcagcctgacgcaggacggtatggtctattacgaacgggcaaaagatctgctggcaaacctcgatgagctggacggtatgtttttgcacgatccctccagcatcagcggacggctccgcgtggatatgcccgtcgccgtagctcgaaatttagtcatccccaaactgcctgcttttctgcagcattatccgggcatcgagctggagctcagcagcagcgatcgtctggtggatgtgatccgcgaagggtttgactgcgtggtacgcgtcggcacgctgaaagattcagggcttattgcccgaccgttgggcaagctgtcggtgattaactgcgccagcccggattatctggcgcgttttggctacccggaaacgctggacgatttaggctcgcacgccgtcattcactacaccgctacgctgggaactcgcccacagggctttgagttttataacggcagtacgacgcagtggataaaaacgggaggggtgttaactgttaacagcaccgaaacttaccaggctgcctgcctcgccgggctgggcatcattcaggttccgcgggttggggtgcgagatttactgcgcgcgaagaaactgattgaaattctcccgcaataccgggccgaaccgatgcctgtctccctgatttatccccaccggcgcaacctctcccgccgggtacatctgttcatggagtggctgaccgaactcacaaaagcttacgtggactagtcgcaagctataattcagtaacatccagccaaacgaaaaggaaaagacgcgtgacgccggaaaataacccgcaacgacccacccaacatttagagtatgaacccatcaagaagatggagaccgagccggaagagaccaggtctccaggtaccgccagcaaagcgctggggaccgtcaccggcattatcgccagaattcagcagtttcccatgattgcgcatctgatacgtgcgaccgaacgctttaatgaccgcatgggaaaccagtttggtgccgccatcacctatttttccttcctgtcgatgatcccgatcctgatggtgtcgtttgcggcggccggttttgtgctcgcgtcgcacccgacgctgttgcaggatatctttaacaaaatcctgaataacgtcagtgatccaacccttgccagcacgctcaaaagcaccatcaataccgccgtccagcagcgcaccaccgtcggtatcgtcggtttgctgattgccctttactccggcgttaactggatgggcaacctgcgcgaggccattcgcgcccagtcgcgcgatgtctgggagcgtaagccgcaggatcaggagaaaatttgggtgaagtatctccgcgactttgtttcgctgattggcctgctcgtcgcgctcatcgtgacgctgtccattacctccgtggcgggctcggcgcagcaaatgatcatctccgcgctctaccttgattacatcgaatggctgaagcccgcctggcgcagcattgggctggccatttccatcttcgccaactacctgctgttcttctggatcttctggcgcttgccgcgccatcgcccgcgcaagaaggcgctgatcagagggacactgatcgcggcgatcggctttgaggtgattaaaatcgtgatgacctacaccctgccgtcgctggtgaaatccccttccggcgcggcattcggctcggtgctggggttaatggcgttcttctacttctttgcacgtttaaccctgttctgcgccgcgtggatcgccactgccgagtacaaagacgacccgcgaatgccgggcaaaacgcaccgttaacccctctcccgggctgaaatttcagcccgattcatcatttcagcatataaatccagtccgtaacttttatttaaccgaaaaccagttttattgcctgatatttaaaatctgtgaagcatttcatagacgtgttttggctggcctgaaaattatccgctttttgttgcttttatcaccaggtcgcggctttgttacagattgaaatgtcgcttttgctgtgcgtaatatggcctttcgttcgacaaaaataagaaaatattatgcaagcaaccgccaccacactcgactcagaaacggaaaacgttccggtaaattcgcgcaataaagttgtcgtcgcctcgctgattggcaccgctatcgagttcttcgacttttacatttacgccaccgcggcggtcatcgtcttcccgcacattttcttcccgcagggcgatccgacggcggccacgctgcagtctctggcgacctttgctatcgcgtttgttgcgcgtccgattggctctgcgctgtttggacactttggcgatcgcatcggacgcaaagtcacgctggtggcctcgctgctgacgatggggatctccaccgtggccatcggcctgctgccgacgtatgagaccatcggcattctggcgccggtcctgctggcgctggcgcgttttggtcagggtctgggactgggtggtgaatggggtggcgcggcgctgctggccaccgagaacgccccggcgcgcaagcgcgcgctgtatggttctttcccgcagcttggcgcaccgattggcttcttcttcgccaacgggacgttcctgctgctctcctggctgctgacggatgaacagttcatgagctggggctggcgtatcccgtttgtcttctcagccgtgctggtgctgattggcctgtacgtgcgtgtttctctgcatgagacccctgttttcgcgaaagtggccgcggcgaacaagcaggtgaaagtgccgctgggcacgctgctgaccaaacacgtccgcgtgaccgtactgggcacgttcatcatgctggccacctacacgctgttctacatcatgaccgtttactccatgaccttcagtaccgccgccgcgccggttgggctgggtctgccgcgtaacgaagtgctgtggatgctgatgatggcggtgatcgggtttggcgtgatggtgccgattgcgggcctgctcgcggataagttcggccgtcgcgcaagcatgatcaccatcaccacgctgatcgttctgtttgctctgttcgtcttcccgccgctgctgggttcaggtagcccggcgctggtgatggcctatctgctgattggcctgagcctgatggggctgaccttcggcccgatgggggcgttgctgccagagctgttcccgacggaagtgcgttataccggcgcgtcgttctcctacaacgtctcgtctattctgggcgcctccgttgcgccgtatatcgccacctggctgcaggcaaactacggcctgttctatgtgggcgtttatctggcggccatggcggcactgacgctgattgcgctgctgctgacgcacgagacgaagcaccaggctctgtaagctaatgccgggtggcggctacgccttacccggcctacgattcaaatgcaggccgggtaagcgcagcgccacccggcaaaaacaggccgcaccttacttcttcatctgtgacaaaatggtccggcactgattcgcctcgccttctgacggcgaaatcaacgccagcagcgctgcggcgggggtaaccagcgtcgcaagcgccgcagccaccgcaccacgcgcaatcagcggtccgggcttcacgcccgcctgcggatttttgaaggttccgcgaacgtacagcggcgagcgcagggtgatgatacggatccccttactttccggatcgatggtcaaatccagctgttcggacgccatactggcggtaccggtcacgttaatcaccgcattttccgtgtcgaaggcaaaaatctgcggacgcgccacgccgttaaccagatccagattggccgccgcgcagttcacccgcacctcatcatcaccgaagatttgcccgatgatgtagttcccgacgttcagccccaggatctccatcaggttgcggctcaccagcccgtcgttcatcagcagcttcaggttgccattaccgctgcccagcagcgccgccacggagttccccacgccgcggatgtcggcatcgccgttcatctcgccgagggtcttctgcatcagctcgacgttcggcatcagcgctttcagcttaagcctgcgcgcctgaatctccgcgcgcccctgcatcggctttttatcgccttccaggtgaatgttggaggaaatcgtcccgcccgccatgccaaacttcagcggctgcaggcgcagatcggcatttttcaggatgatatgcgtcgagaggtcgctcagcggcaacgtgctgccatgctcaattttacgccctttgaagcggacgtccgcatccatcacgttccacttatcggtttcaaagcgatcgtaaggcagcacttttcccgcaggctgaatgtcctttttcacctcttttgacttcgtacctttaccggaatccacgccgatcagcgggccgagatcggccagacgcagctggcgggactcaacgtccccttccagcttcggtctcggttttccggtggtgtaggtcagcgagccgtggatatcgctgtcgccgatgcggccgttaaaatcacggtagtcaaaaaccgacgatttttcgctgtcgattttggcgaccagatgcccgtccgtttcgaacggcggggtatccggcagcagcacgccggtcagctcatacagctcgcccagcgaatcaccggcaaatttaagctgaagatcgacgccgcccatgttcatcgggtcgttaaccgttcccacgaacgccacgcgggtgttaccggagcggaagtccgcctgcaccgggaacggcgtgccttcgctccggagcgccagcatgccgcctattttccctttaccgctgagcggctggtcgttgtagcgtccttttgccgtcaggccgaagacatagtcgcccacgcttgccgtttcacctttggctttcgtccccgtgacctcgctaaacggcagcggcttgcccagcggatcgaccaggatctccacgtcggccttgctgaccttatcgtcgatggcgatccgcccgcgatcgaaaagaatattgtccagacggaatgaccacgaagagggctgggcattcggatctttttcgccgtcgctggcaaggttaaacgtccagttattgtttttttcagagaggcgaatcaggcgcgcatcgggctgctggagcttgatccacggtagatagacggttttggtcaggagcgcgagcggcgccagcgtggcttccacgcgcggcagatgcaccatggtcacttcggggatatccggcgggttaccgagaatgatgtcgtcggcgtggacgtgcggccaggggatccagcttcgccagccgggctcctctttctgacgctcccacacgacccctaaatcaccgcgtatggcgaaggggcggttcagttcggttgagactttctggttgatggtcggcttaagacggttccagtcaaacgtcgcaataatgatggcgacgaccacgatcaacaacaagaaaatccctgctgtccaggagatcaccctggttgttcttgtcatttttgtcccctttcctgatgacctgtcctgtaaaactatagtccagacaaagggaagcgggcttatcagagggttgttatcacgctatcgaggcgatccatgggtaccggtcgggagaggaaatagccttgcgccgccgcggcaggcgagctttgcacatcacgccactcttccagcgtttccacaccttcaacaatcacgccctggcaatagcggttcatcagctgtaataacagcgtaaacaggttccgcccttccggggtctgacgcagcataatgaacaggtcgcgggccactttaatgtagtcataacgcacttcactcagagccgaaaagttcgccatgccggtgccaaagtcatccagccacagcgggccgtattcgcatatggaggcaaacgaggagtcctgcggcaggcggacatgctccaccagctcaaagcgcacccacggcagggtggctatcagcgcctgcaatttcgcgttctgacgcagcgccagcagagtggggccatcgacattcactgaagcgaggatatcgtgctgttcgaaaaagggctgcttcgttgccagcatacggagctgctcttccagcacgtcaagacgctggcgaacggccacttcggcaaaatagcgatccggtgcgatgcgctgggaagggtttgagggatgcgtcacgacggtcaaaatttcaatggccatcagtcgaccgtctgttcggtatatcggctgataggtatacgcacgctcacattgcagccagtagcgatgctcctgcaagttctcaatacttgcctcaggcgtggtgctcagccgctggataacctgctctgacttcatttcagatgtcctgttgttgggatggcctttctggactcgtcacaggattatcggcgcgacaattgagaactttatgttcaattcaccgggaaaatgaaattaagatgacagaaatgcgcaggaacacgcgctggctcaaataaaataatggaacgttgttttaatatagttgacctgttaattcactcagcgcacactgctgatcattcttctgttcaggttcacgattatgtctaaaaaaattgccgtgattggcgaatgcatgattgagctgtcacaaaaaggcgcggaagtgagccgcggatttggtggcgatacgttaaacacctccgtttatattgcccgccaggttgcgcctgaggcgctcaccgtgaactacgttaccgctctggggacggacagcttcagccagcagatgcttgaggcctggcaaagtgaacatattgatacctcgctgatccagcgtatggaaaaccgcctgccgggtttgtattacattgagaccgacgacaccggcgaacgcacgttttattactggcgtaacgaagccgcggccaaattctggctggagagcgaggatgccgcggccatctgcgaagcgctgtcgaccttcgactatctctatctgagcgggatcagcctggcgatcctgagccccaccagccgtgaaaagctgctctcgctgctgcgcgaatgccgtgccaacggcggcaaggtcattttcgataacaactaccgcccgcgcctgtgggtcagccgtgaagagacgcagcaggtctatcagcagatgctgcaatgcaccgacatcgccttcctgacgctcgacgatgaagacgccctctggggggagaaaccggtagaggacgtgattgcacgcacgcaagcggctggcgtgagcgaagtggtgattaagcgcggtgcggagtcgtgcctggtcgcgattacgggtgaagcggtggttgaggtcccggctgtgaagcttgccaaagagaaagtgattgataccacggcggcgggtgattcattcagcgcgggctatctggcagtacgcctgacgggcggaacgccggaagcggcggcacagcgtggacatctgacggccagcacggtgattcagtatcgcggggcgattattccgcgtgaggcgatgcctgtttaagtagggtgcgggctgatgccctaaccctctcccacagggagagggttagtctacgcattactgcccttgcgggatatccgtcgcgtccgggtgtaaatcatcagccgtcgcggcctgcgtcggctgcggcgcggtcgccatgatggaatcccaggtcttctgaagttccttcatgtcatattccggctcgcccttcggctgcagaaggatcaacgccatctcctgcgacagctgctgacggagatcctggttgagcatttcgacggtcagaccgttcaggaaatcctgacggagcttctggtactgttccggcgcaatgtccaccacctgattctgcaaagagcgaatacgctggctgatcagaatgtcggtatcggcgcgcgcgtaggtcgcaaacagcttctgcagctcgagttttttctgcgccacaagcgcgttgaactcctcttcggaaagcccctctttacgcacttttgccaactctttcgcgacgacacccagattggcattcagcttatcgcccggtgattcaacgttaatggcgcattgcgcacgctggaacagcacgcggcagtcaaagccaagaccgatattcttcacgttgttcttactgagcgtctgctgaacgtgccagaacagcgcttcacgcgccaggtcggcacgccagtagcgcaacagcgccgcggactcacggatgggctgccaggcgttatcccacatcacagagagtcggtcctgacgcacggtgtccgtcataatgctgacaggctctacacgcagcggggagagtgtcggaacaggggcaggcgattcacgcttgcctttcagatcgccaaacgctttgttgatctgctccaccaccgcgcggctgtccacgttacccaccacgatcagcgtcatcgcgtccggggtgtaccacttctggtagaacgatttcacctgctcggcgtccaccggctgttttagcggctcggcagggtcatgtcccagcaacgtcgagcctttcaggcggtaacgccaccagccctctttggtatcaccaggccaggtcgccaccatgtcgctgttgctcaacgcatagttgacggtgtccggcgtaatcgccagattgccggaggcatcggagagatacgtcagggcttctttaagcagatcgttgcggttattaggcaggctcaggttaaacatggtgtagtcatacgagaccacagccggaggaagcgggcgcttcggatcgatggcctgttgccagagcgaacgcacctgaaccgcttgcaggctgccgctctgcgtgagcgccagccggggaataaagtggctgaaaccggtttgctgagtgctttccgtaagggaaccagtattaacagacagacggatttcaatacggtcactgggacgttgcggcgtggctaacacctgccactgaaaaccgttcgctagtgtcccttgttgccaggccgggtctggctggagcgcatctgcctgcacataactggctgctgccatcatcagcaaaccgccggttaagagtcgaatttttgtgccctgcatgtgaacccctgatcaacattcctggttaaaaaagagtgcctcgcgacgcgcttcactcttaaagatgacgatgaaaacacgtcgattagaccgcgcgttcggcaaaacgtcacggtccgaagtgaaatatacccaaaaaaaatcttgtcgaattatgacaggtatgaacagttattatgcgcaggagcccgcatccccacaagggaatacgggcatttgtgacaagattaagaggataagccaggatttttgctgtcagttgaacgattattcagagtatcgtcgagctttttgtgatccagctctttcacccatttcgcgaccactaccgttgccacgccgttacccaccaggttggttaacgcacgcgcctctgacataaagcggtcaataccgagaatcaacgccaggcccgccactggcaggtgccccactgcagagatagtggcagccagcacgataaagccgctgcccgttacgcccgccgcgcctttagaggagagcaggagcaccaccagcagggtgatctgatggaaaatatccatatggctgttggtcgcctgtgcgataaacaccgccgccatcgtcaggtatatcgaggtgccgtccaggttgaaggagtagcccgtcgggatcaccagccccaccaccgatttacgacacccgagtttctccatcttatcgagcatgcgcggcagcgccgattctgacgaggaggttcccagaacaatcagcagctcttcgcggatgtaacggataaatttgaagatgctgaaaccggtcgcgcgggcgatggagcccagcaccaccaccacgaaaagaatacaggtgatatagaaacagataatcagctgacccaactggaccagcgtaccgacgccatacttaccgatggtgaaggccatcgcaccgaaggcaccgataggcgccaggcgcatgatcatattgatgatgccgaagatgacctgcgagaagctttcgatcacgttaaagatcagctgacctttgctgcccagacggtgcagggcgaagccaaacatcacggcgaacagcagcacctggaggatgtttccgctggcgaacgcgccaatgacgctgccaggaatgacgtccagcaggaaggccaccacgccctgatccttcgcctgctcggcatagaccgcaaccgctttggcatccagcgtcgagggatcgacgttcatccccgcacctggctgcaccacgttaacgatgaccagaccaataatcagcgcaagggtactgaccacttcaaaatagagaagcgccactgcaccggtacggccaaccgccttcatgctttccatgccagcgatgcccgtgacgaccgtacagaagatcaccggcgcgatgaccattttaatgagcttaacgaacgcgtcgccaagcggtttcatttgcgcgcccagttcagggtaatagtgacccagcagaataccgatggcgatggctgtcaggacctggaaataaagacttttgaagagtgaggttttcatagggtgtccttgggaataaaaaccacaggctttgtaaggttatggttaacctgcggctttaaaataacacccgcataacaggacagaaataaactcagttcaaatttgaaacacaaatgttaagaaatttgagctggctcgcacaagccagcaacaaaattacacttttgcgttattgtcagcaccagaaaggtatcgttcttcaaagacatccgaaggcactgcgggggcaaacaggaaaccctgcccgctctccacgcccgcctctgccagccaggcgcgttgcgcgtcggtttcaattccctcggcaataagatgcaggttgaggctgcgcgccatctggataatcgcctgcaccatgctgctgtcgtccggcagaccgtcgacaaacgctttgtcaatttttagtacatccaccggaagcgtcttcatgtgctgaagctggcgcagcccggcgtagcccatgccaaaatcgtccagggcaatgcgaatgccggcattgcgcagcggcttcaggatggcaaccgcgtcgttaggatcgtcaatgcgtcggctctccgtcacttccagcgtcagcgtatcgggcttgatccggtaacgatggatcagctccagcatctcagaaaccatggtcgggtgcataagctgcatggcagacaaattgaccgacagcggcagcgttacgccgcgctcctgccaggcggcaagctgacgacaggactcttcgagcacccagtagccgacggtgaccatcaggccgcaggactcgatgcgctcaatcagcccttccggcagctcccatgtgccatccggctgctgcagacgcagcagggcctcggcgctttttacctctcccgtccgcagatccacctgcggctgcagccagagggcaaactggcggttatccagcgcggtcaggatgtcactctcttccgtcaggcgctgctgcgccttttccatctgcgccgggtcgaagaactggatttggtttttccctttgcgccgggcggtaaaggccgccgagaaggcgcggcgataaagctgttccgcggtcaggtcgccatagaacatggcaatcccgatactggcactcgggcgaagctggataccctgaatcggcagccgctcattaatgacagtgagtacttgctgacctaacgtgatcgcatgccagggttcttttacgccgttggcaatcaccaccaggtcgtaaccgctgacctgggtcagcaccatgcgcggggcaaggacagatttgatcttttccaccagggtgagcagcaacatttcgcgctggctctcctgaagcacgccagccgtgtcctgcagggtttcacaggcaatgaccatcagcgcggtggtttgctggcgctcaacggtttgctccagcatcgccatcaggaacgctttattgggaagctccgataccggaaaacgggtggcgctactgttcatctcatcctgctgacgctggatgcgctgctggttgaggttgtagctgcgcaccagcatgccgatctcatcgtcatgatgcagacgcggcagctcaagctggtgtcccatctgatcctgcggcgcaagcgtgttcagctcgcgggcgatacggcgcaggggatggacaatcagccggttaatgcaccaggtcagcgcaacgctgagaataagcgtcataagtaagcaagtggtcactaacgtaaccacccaactcatgacgaatttatacatgcggtaggagtctgcctgtaacaccaggtaggccagaggctgtggattcgcagggcgctcaagcgaataaacgggaagcgaaatttgcaccggcagctcaaacaggcgcatcaccatcatcgggacgggacgctccgggataaagctcatccgcagcgcctgaaactgattgggtagcacgacgtccgcccggctcacaacaccggccggctgaatacgtttcagaatggtttccgcttcggggatatcccctttcaggatagaggcagacagcgggccgcgtaccgagcgggcgatactttctaattgcgaagccgtgttatagcgattctgctgtacggaatgaaacagcaaaattacgcagaagagcaggacaaacagcatggtgacggcagagaccatcgccatctgtttgattgttaaggaacggctgacacgcaaaatgactctccacaaaactcgaagcgcagggcgcgccagggtgtaaacctggcgcgcctgagtatacccgattgctgcgctgttaagagagacttacaaatggattaaggaaaatccgattaccagtccgcgtaagggatgagcggttgcggcggtaagtccatatcgccctgccagcctgcagcagagtagcgcacatagatcagcgcatggcttggggtatagtctttcgcttcctgaatgtccacgcccatgccaacaaaccagttggacgtaacccggcgctcaataatggcccgcgcggtataacccgtgcctgaggagctgctgccggtttccattgcgccccgatcggtatagcggtctggctcatcggtcgggatcagattctggatcgggtagcgcagctcgtctttggttttagagtgagaccaggagaccgagccccccagctcccaggaccagttttccgtgcgcttacgccaggtcaccggcaaggcgaaggagacatactcctgcgggctgtaatagccgccctgacccagggtataaccgctcaggtctttgtcgtagtgccagagcatgttggagacgccgaccgtcaggcgctcattgtttttattaatgagcttgtagtagtaacccgtcatccagcggacgcgccagttatcctctacatttttacccgtcagcgtttccgcgttcaggcttgaccagacgccgttcgcttcccctttgtcatagctgatgctcacgccgccaccggtcgcgcgtacgccgccccaggtggtgccggtgttggtgtctttttgcccgccgaaggccagcagagagctggagattggccgacgatgggcgttaacggtatagccgatgggccccagatcgctgctgtagctgatgccgcccaccacgtcgacgacgtcaaagcccatcggcgtggtgccaatatccatcgcccaggttttattctgccagccgacagcgacgcttgcgccattgtctgactgatgggtgttaccgctacacggcgtttcgtagcaggttccccatttagggtcgtaagtcccgttcctggtatcgaatgatccgacgtccatattgaccagatcgcttctgaagaacatgcgcccgtcagagagaggcgcatccacctgcagcatggtggtatgcgctttcagatcggaatagccgcccgtgccgctggagccccagtaatcgtgctgcagcgtgacgttaacatcctgctggcggtacaactcaccggcatcactgcgcacgccgcgcttcagccagtcgtctttttcatcgttacgcgtcagacgggtgaaactgtcgttatcagccggacgcgtcgtggtgatacccgtcgataccatcgcatctttataggtttccagcgcctgctgaggctgcccgttctgcgcctggaaacgcgcggcatcacgcagcaccagcgcgttttccattgatccgggctgcgatttagcctgcggaatgattttactgaaggtctgttctgccgcggcggaatcacccagccccgcctgcgccatcgcgatgcggcgctgcatattgagcgacagcggctggccgttctgcgcggcgggcagcttcgccagctccgcgcgcgcggcatctttgttaccctgggcgctgtaaatctcggtcaggccgaggatcgcgtcttcgttctgcggctcacgctgcaggacggcgttgtacgtcgttttcgcggaattcagatcgccacgctgctgtgcccagtccgccagcgtcaggtcgatgcgggtggaggttggctgctggcgaagaagattctctgcctcctgctctttaccgctgtcccgcaggcggttggcggtttccagcacctgattgctttgcaggcggtcggcaagttcctgattattgctgttccactggctgcgcggcagcgtgtccagatgcgccagcgcggcacggtcctgatcgtttccggaaagatagagcccgctggcatagacctgatccgggtcggacggtttctggcgggcaagctgacgcatcagggtgtccgcctggctgcgctgacccgcgctgtagagatcgcgcgacagacgataggttatccacacgtcgccaggagagagcgccagacgacgacgctggatttctgctgcctgggcgtatttcccctgattttccagctgttcggcctgggcggagagctgctcgttggtcagactacgctcgatatcatcaatgctccgacgctggctggcggaaagcgactggataaactgcgaggctttctccggggactgcgcgcggtaaatattggccaggccgcgaaccgcgttgctgttgccgctgtccattcgcagcgcctgacggtaataacgctccgccgcgtcgttatctttacgcgccgcggcggcgtcgcccagccccagcaccgcgtagctgtcggtattgtcgatgttacgcgcctgctgatagtaacgctctgcctgcgccgggttattcgccttcagcgccgcatcgccctgctggatcagcagccagtagcggttaaccttcagaagactatcccacttaccccgattatcgctctggggatcgagggcaatcgccttttcaaattgtgccaccgcgcgggcgcggtcgcccttctgggaatacgcctgccccagggcacccaccgcttcactgtcggcatggttggcgctgacggctttttgcagctcggccaccgccttactgccctgcccggcatccaccgccgcgagcccttccgctttcgcgcgaaacgccggatcggcgagctgtttttgctgcgcttcaagctgggcacgcgccgcagcgacgctatccccgtcgctgaatacgttcagatatttttgcagcgcgctgacgctggcgctgctggcaggctggtctttgatttggtcgtaccacatatcagacgcctggccgcggccattggtggatttggccatctcctgcagtaccgcaaagccttcatcacgtcgtccgctctggaacagaagctgggccagcgttgtctgcagctgcgtattcccggggctgctgctgttaatttttttcagctggttaatggccgcaccgcggcgagctggatctttcgccacgacgttccagtattccgtcgccacgtcgccacccggagggttgccgtcaaacagcttgtcataggcggcaatcgcttcctgcgtgtgccccgtagtggcgagcagtcgcgcctgctggagctgctgtcggccatccggagtagaaagcagcatggtgttgcgcgaggactggtaagcgctcgaacccggggcgatccctttcagacgatccagctctttttgcgcgccggcgttatcgccctgacgcagcaggtagcgaaagcgcgcggcaatgacgtcagggttgttggggtcaatcagctcaaggcgatagagcgactgacgaaccaaatcctcacgctgtgtcgattcgcccagcctgacctgctccagcagctgtttctgctgcggagagttggcggcctgtgcccacggcataagcgccaggccaagcgataaactgagtagatttactgtgaacttgcgcattcctggccccaatccggtattaattcaccttttgcggtgaagcgaaaacgatgctgatcccatccttgcccaaaaagcgtcagcacatagctgtaataggcattgttatcgggaaaatggtctgcaacgcgctggcgctgaaccgcctgggcatcacgttgttgtaaaaaaggcaacatagcggcagagaacccgaccgggccgtcaccggtacgtttccccgtcgccacatccactttctccggcggcacaccccgtttcacggtctttgccgccatcggctggaagcgcgtcaggagccgggctttctgaggatctttatcactcatcatgcccacccagagatacacgcggatggcgtcgtagccgcccaccagcgctttctcctgctgtaaccgccagcctttgtttttctgatactgcacccagtccggcgaaaaacctttcggcgcactctcaagcagcaggcgcaggttagtttcacgaagctgggtccacggggaaccaaagcgcgtgaaataagccgctagctgcggaggaagatagctggggttaaaacgccaggcgttctcatcggcaaaaccgactttaccaggaagcagcattgcgccgagccccgggacgttgaccacttcctcgctgacaatgcgtttcagcagcgccttacccgtgcgggtatagtcccgatctttccacagccgacccgcttcgaccagtgaccaggcgatccagacatcggcatcagaggcggagttgttatcaatcaccgcccaggcgtctttatctttctgaccccatagccaggcaggcagatgggcgttgagatcgccgctggcgagattatcgcgcgtccacgtcagcagcaggtcaaaggctttgcgatcgttcgccgccagggcaaagaacagggcgtagctttgcccttccgaggtcgtaattttgcgcgtgtcactgggatcaatgacgcgcccgccttcactgatgtagtcctttttaaactgctcccaggcaggccaggtacaggcggcgcgaagaggaagcgccgccagcatcaccgctgctaatacacaccagcgaaaggctttcatcacatcttactcatccgggttcagacgacgacggctgatgattcgcagcagacgccacagcacccatgccagcaagaccacgctgaccgcagccaggatagcgagcagaaccggatggttagccagcgcataccacaggcgttcgaaccacggcagatggcccacgtagtacacatcccccacgcgcaggctattgacgccggactcacggatcaccgacacggaaccaaacatcgcggcacgtttaccgctgtcgttcatggccgtattgagcagttcatagccgcgcgggctgtccgcgaggagagccaccacgctgcgctgttcgttgtaaggcgactggaagcccaccaccgcggccatcgccccctgagacgttaccgtcgtctgcgcgctggcctgacgatcgttcacatccggcataatgctcgggaactcggtctgtcgcagcggcgtattaacccaggactgggccgctttcaccagcagatcgatacgtttgtcatccttcagcttatccgggatggtcccgatcaccatgatgtcagcatctttgttctgaatctggctgccatcgtccgttaacgtgacgttaatggccggtaatcctgtttgtcctccaacggtcgccatggtgtcgagcagggtcgtaacctgaccttcgtttggcgcttttggcattaccacaatggactcagagagatcggccatacggctgaacgggaagcccgcgttagcaaaggcgcgcaggtccggcatcgccaggaagtgatagtacttcgagaagtcgatggtcgactcatcgccaatcacaacgtggttctgcaccggctggaaggtgatgcagttttccgccgagccgccaggcatcgggttcatgtactggaaatcaaagcgcagctggtttatcgcacccagcttcagtgccggaatagaaacatccgttttaccgtccagcagcccctgcagcaccggcaggcgaagcatcaggcggttcgtatcctgcgtgctttgcaggctgaaggattgcaggaactggttgttcaggctgatatccatgcgcgagctgtctttggtggctggcgcggtatagcggtagttcagattgatatcaatgccgttggtacgcagcaggtacagatccggcggcagattcagcgacaggctaatcggcgctggctcaagccccgtcgcctgcagctgttcttcataggttttcagctcgccaaaggtgaccgcacggtcggtacgcacccagtttggcgcatcataaggtttacgcgccagcagcggcttgacctcatctatcacgacgctgttgccgcggaaaaggacgttgccctgggcaatggcttttgctgcctgcaccagatctttatcatcacgaccaaagaccaccagcagcttcacgtacgggttttccgggtggcttatcatctcaacggtcggcgcgttgacgtccggatgatcgcgcaggaaggccggacgttttgcattggtggcaaacacaatggcatttctgtccggcagtttgtcatacatcgccgggaagctctgaccgcgccagcccgcgcgtgaaccaaaccaggaggccacaatggtggccgccagctgctcggtcacgtccggggacgatgcgaacaccatcggcagcgtgagcgggcggttatcacgcggatcgaagaacggaaccgggaaggccgagagatcgtttttcagcgccagcgactggtaggtcatctgcagcgaggagttacgcccgacgtccatccacagcgtgttgctggccgggttttcgcagacatcgcggtagtggccgacaaactccaggcggatacgattaaagtcggtgatgaacagcgggttgatcggcacctgcgcctgcgttttcttgccgagctgctctttcgtgaccggcagaacgtccatcagttcgtcattcagatagaccttcagctgagactgggtcggcagcagcgatggcgacggcgtgtattcgagattcagcaccgcattagagacgacctcgtcgctgcgcatgccaaattcaatgccgccgttagggttgatgccgcgcagcaccatgctgcccggaggcggcgcaatttgcgcaaaggtcagcttcacgtcacgcgacggcgcattgtccgcaacgacgggcgcattcgcaccccggacgcccggcatcacctgcccgatgacctggccgtctgccggcagggtgttcccctccgttggctggttcggcatgatgttttcagtttgacctagtgccgcggtgacaaccggatcggttgcttgcgcgacgacaggtacggttggcgcaggcgttgccgctgcgttacccggggctgcgttagccattgttgcggggatcgcattcatccccattgccactgcacataaccaggaaagttttgttttcatcgcgttatcatcattgttgagccataaccgggtccgcctgcttcgcctcatcccgctcaggacgacgaggaatgaacgacacgacccaggaaaccagcgaagtaagtgaccggaaaattaatttcaccgacgacggggcaaattctgcaaggtgacgatagccacggaaccccagcttcagaatatccagcaggctttccagaggcttatcctccgggaagctgtcctgccagagagcccacgtatccgcgcgggcaaacgtacactgagctttttcttctggtgcgttatcgatctggtcgaatgcacgagcagaaccaccgtaggtttttgccagaacggtagtgattgcagcggtcagcgttgttttaccatggtcaacgtggccgatagtaccgacgttaacgtgcggttttgtacgttcaaacttttctttagacatcgattgtccctctaagacacggataaatcggtgatatcaccacatcaaccaggcgaaatgcctgaattgttgaatacagtaaaattgaaacagagagaaacgggaaggagaagtgaagtggtgctgatacccagagtcgaactggggacctcacccttaccaagggtgcgctctaccaactgagccatatcagcacgtattggagcgggcagcgggaatcgaacccgcatcatcagcttggaaggctgaggtaatagccattatacgatgcccgcatcctgaaactcggctacccagttctttctgtaacaaaaaaagagatttctctctttttcagtttgagctggctaatttttccaaccagctccggcggcatttacgctgccagaaagtggtggtgggggaaggattcgaaccttcgaagtctgtgacggcagatttacagtctgctccctttggccgctcgggaaccccaccggacttgatggtgccgactaccggaatcgaactggtgacctactgattacaagtcagttgctctacctactgagctaagtcggcatcaagtagcgcgcattctatggatacctgcgcggtcatgcaactaaaaatttgcataaaacgttctttcgctcacattttatgctaacagcgtgttgagcgctgtaaaagtagtcattcacggtcaaataatcaacatgtaaggggtatttgcactgtaaacaccgtagcgtgacggcctccgcgtaacgcagcgctttccatcttttttcttattattcctgtcatctggtgttaacctcctgcccattgtccaaaattaactgtgtgatgagccacgatccggcagtttaatgctggctcactgaagcatgcttatgagcaaaaaagagcaaacgttaatgacgccttatcttcactttaaccgcagccagtgggctgccctgcgtgattccgtccctatgacgctgacggaaggtgaaatcgcacggttaaaagggataaacgaagatctgtcccttgaagaagtggcagaaatttatctccccctctcgcgcttgcttaacttctatatcagctcgaacctgcgtcgtcaggcggtgctggagcagtttctcgggacgaacggtcaacgcattccttatatcatcagtatcgcaggcagcgtggccgtgggtaaaagtaccaccgcacgcgtcctgcaggcactgttgagccgctggccggaacaccgcagcgtggagctgatcacgaccgacggcttcctgcatccaaacgaagtattaaaagaacgcgggctgatgaagaagaaaggcttcccgctctcttatgatatgcaccgtctggtaaaatttgtctccgatctgaaatccggcgtgcctcacgtgacggcgccggtctattcgcacctgatctacgatcgcatcccgggtggggataagacggtggtccagccggatattctcattctggaaggtctcaacgtgctgcaaagcggcatggactatcctcacgatccgcatcacgtctttgtctcggatttcgtcgatttctctatttatgtcgatgcgccggaagacctgctgcagaactggtacatcaaccgcttcctgaagttccgtgaaggggcattcaccgatccggattcctatttccaccactatgctcagctttctgaagaagaagcgatcaatgtggcgacggggctatggaatgagatcaactatgtgaatcttaaagagaacatcctgccgacgcgcgagcgtgcgagccttatcctcaccaagagcgagaagcacgccgtcgaccagattcgcctgcggaaataataaagcagacataaaaaaaccggcttagcgccggtttttttcgttatgcgtgtggcttctcgccattttcatcctgatcgaccgcgaagcaggccaccagctgccccccatactcctttaactgcggctgtagctgggtgcaggggccaaagcggcggctgcagcgggcgttgaatgcacatcccggcggcggattcagcgggcttggcagctctcccgtcagctttatgcgctcacgacgatcgtccgggttcagacgcggcgtcgcagacagcagcgcctgggtgtacgggtgacgagggttattaaagatctggtctttggtccccttctccacgcagcgccccaggtacatcaccatcacttcatcggcaatatgctccaccaccgacaggtcgtgggagatgaacacgtaggatagccccagctcctgctggagatccatcatcaggttcagcacctgcgcccgcacggagacgtcgagcgctgaaacaggttcatcggcaatcaccacgtccgggtcaagcatcagcccgcgcgcgatagcgatacgctgacgctggccgccggagaacatgtgcgggtagcggtcatagtgctcggttttgaggccgaccttcgccatcatcgccagcgctttttcacggcgctgctctttgctgagattgctgttaatcagcagcggctcttccagaatctgccccacctttttacgcgggttcagcgaaccgtacgggttctggaacacaatctggattttctggcgacgcagcttctgcgcctgcgggtcgtgcttgagcagatcctgcccctgataatagagctcgccgccggtcggcacttcaatcatcgtcagcagacggcccagcgtggatttcccgcagccggactcccccaccaccgccagcgttttaccgcgttcgaggttaaaggagacgccgtccagcgctttcaccaggcgttcaggggcaaacagccccttcttcaccgggtaatattttttcagatcgatggcctgcaacagcggctgttgcgtggtggcctgttgcgtactcatagtgttggcctcccggcatcatcgagtgggtagtggcatttcgactgacgaccgtcagccagctggttcagctctggttcttccgcccggcatttgtccgtcgcatacggacagcgcggattgagcagacagccctgcggacggtcatatttgcccggcaccacacccggcagcgacgccagacgcgctttatcctgagcaaactccggcagcgcgcgtaaaagcgcctgggtatacgggtgacgcggcgcgcggaagatatcgtgtgaatttccggtctcgaccacctggccggcatacatcacgatgattttgtgcgcagcttcagccaccagcgccagatcgtgcgtaatcagcaccagcgccatgttctctttctgctgcagctccagcagcagctcgatgatttgcgcctggatggtcacatccagcgccgtcgtcggttcatcggcaatcagcagctttggccgacaggcaatcgccatggcgatcatcacgcgctggctcatcccgcctgaaagctggtgcgggtaaacgtccagacgcgatgccgggtcaggaatgcccacctggttcagcagatcgatcgcccgctgacgacgcgttttcttattcccgccctggtgcaccttgattgcttccataatctggaaaccgacggtgtagcacgggttcaggctggtcatcggatcctggaaaatcatcgccacttccgcgcccaccagctggcggcgctgtttctcagaaatgcgcttcaggtcctgaccgttgaactgcaggttttccgccatcacgcggcccgggtaatcaatcagccccatgatcgccagtgagctcactgacttaccggaaccggactccccgacaatgccaaccacttcgccctgatttacgctgtagctgatgcggtccacggcgcgaaacggggtgccttcatcgccgaagtgcaccgataatttatctacatttaataacgccatctcgtgcctcttactgcttcagtttgggatcaagcgcatcacgcaggccatcacccatcaggttaaatgccagcaccgtcagcaggattgccagacccgggaaggtgacaacccaccaggcgctttgtgcgaactgcaacacgtcggagagcatggtgccccactccggtgttggcggctgcgcacccatgcccaggaagccaagagcggccatatcaagaatggcgttagagaaaccgagcgacgcctgaacgatcagcggcgcaaggcagttagggaagatattgacgaacatctggcgcatcgcaccggcacccgccacgcgagaggcggtgacgtaatcgcggttcacttccaccagcaccgccgcacgggttaaacgcacgtagtgaggaagcgccacgaacgtcagcgccagggcggcgttaccgatcgacggaccgaagatcgccaccagcaccagggccagcagcaggcttggcagcgccagcatgatgtcaacgatacgcatgatgatgttatcaacaatgccgccgaagtaaccggcaaccaggcccagcacgatccccataatcagggataaaaccaccaccaggcagccgaccagcagcgacaagcgcgcaccgtacatcagacgcgacagcacatcgcggcccacatcatcggtccccagcaggtgcgccaggctaccgccatcctgccaggcaggcggggcgagcagcgcatcgcggaactgatccgccgggttatacggcgcgaggacgttcgcaaacaccgcaatcaggatcatgatagcgacatacaccagccccaccaccgcgcctttgttgcgcttgaagtagtgccagaactcctgcatcggcgtcatcggaaccggtgcagcaacaactttgttttcagaaacctgtgacatgatggccccttacttcttatgacgaatacgcgggttcaccacgccgtacagcaaatcgaccagcaggttgacgaggataatcatcgtcgcgaccagcagcacaccgccctgcaccaccggatagtcacggcgttgcagcgcgtcaatcagccagcgacccaggcccggccaggagaagatggtttcggtcaggatcgcccccgccagcaatgtccccacctggagaccgataacggtcaccaccggcagcatggcgttacgcagcgcatggacgatgataacgcgcatacgcgtcaggcccttggcgcgcgcggtgcggatataatcctcacccagcacttccagcatcgatgaacgggtcatacgcacgatcaccgccagaggaatggtgcccagcaccatggcaggcaggatcatatgcgcgacggcatccatgaagttgccctcttcgccccagatagccgtatcaattagcataaagccggtgagcgggttggagtcatccaggaagaccatatcgctgacgcgcccggagaccggtgtcaggttaagctgcaccgagaccagcatgatcagcatcatgccccaccagaagataggcatggagtaaccggtcagcgccaggcccacagcggtgtggtcaaaaatagagccacgcttaacggcagccagtaccccgacaggaatacccaccgcggtggcgaaaatcatggcgcagacgccaagctccagcgtcgctttaaaacgcggcacgaactcgtcccacaccgggagacggcttttcagcgaaatccctaaatcaccgtgcagcacgccccagatatagtggagatactgctgccacattggcttatcgaggccaagttcagccagcagctgtgcatggcgctcaggggaaataccacgctcgcccgccataatcattaccgggtcgccggggatcatatggacgaaggcaaaagtgagaagggtgataccgataaacgtggggataacaagtcccagacgtcggaggatgaactgcaacataacccggattctctctgatgacgcacgaccagtggcgtgacgtctgtattgctcacaaatcttatcccctctcctttcagagagagaattaagcactgctgccgggtggcgctacgcttacccggcctacataccgtaggccagtgcaagcgcagcgccgcctggcgttgcttttaattattcaaccgatacgttttcgaagtggtgtttgcccagtggatcaaccacgtagcctttcacttctttacgcactggctcgtacacggtggagtgagcaacaatcagcgccggagcctgatcgtgcataacaacctgcgcctgcttgtacagttcaatacgtttgttgtgatcgtcggtcgcacgcgccggctggatcagatcttcaaacggcttgtagcaccagcgagagtagttagaaccgtctttcgctgcagcacagctgaacagggtagcgaagaagttgtccggatccccgttgtcaccggtccagcccatcatcactgcctggtgctcacccgctttggcgcgcttcaggtactcgccccactcgtaggtcacaatcttggcctgtacgccaatcttcgcccagtcagcctgaaccatttctgccatacggcgtgcgttcgggttgtacggacgctgtaccggcatcgcccacagctcaacggtgaagcctttatcctggcccgcttctttcagcagcgctttcgctttctcaggatcgtaggagtaatctttaacgtcgtcgttatagccccacatggttggtgggatcaggtttttggctgcaacgccagcgccctggtaaaccgccttgatgatcgcttctttgttcaccgcgtaggtcagcgcctgacgcactttcacgtcatcaaacggtttcttctcggtgttgaaggagagatagcccacgttcaggccagcctgctccagcaggttgatgttcttatcctgcttcatgcgggcgatgtcagccgggttcgggtatggcatcacctggcattcgtttttctgcagttttgcataacgtactgacgcatccggcgtgatggagaagaccagacgatcaatcttcggcttggtgccccagtagccttcgaatgatttatacagaatacgggagtctttctggtactgcagcagctggaatggaccggtaccgattgggttcaggtcgactttttccggcgtaccggctttcagcatgttgtccgcgtactctttggacagaattgaggcgaagtccatggccaggtcagccaggaacggtgcttccggacgcgtcagcacgaactgaacggtattatcgtccacttttttcacttcagagatcagatccggcagacccatcccttcgaagtattcatagctgccgccagagactttgtggtacgggttctgagcgtttttctgacggtcgaaggagaacacaacgtcgtcggcgttaaagtcgcgcgttggtttgaattctttgctgtcctgccacttcacgcccttgcgcaggtggaaggtgtaggttttaccgtcttcgctgacgtcccacttctcggccagacccggaatcacttccgtggtgccggttttgaattcaaccagacggttatagatcggtacagagcttgcgtcgtaagtcgtaccagaggtaaagagctgtgggttaaagccttccggcgagccttcagaacagtaaaccagggtttttgcctgtacgcttgctgccacggtcatagccaccaggctcagaccaagcttcagcatccctgacttcttcaaggaaatactcattattctgctccaatgtgatgttttgctttgttgtgttacgccgccagacctttatttattttttacccggtccggtcggaggtgcccgaaggcgttaaagggatggagaatcctttcagaagagcgtttgagttgcagcgcagatcgtccctgaaatgcccctcatgccctacaatctgtcaacagaatgtgaaaacgtcaatacaggtgacggggatttacgctgagtgtgagaaaccgcaaacaaagattaaaaaaaccatgagcgtcagttttcagcagggaaatttatgctactcgccatgttgcagcacaactatcttcatatttcgcaacaatcagtgattaacttttattcagaatgggtaaattttcttgcagaatggtgattatctgagcactaaataccgcgaacgttaaaacgcacagcgaaaaatgctgaggttatccataagcaacgcgaaaaaagatcaatctatatataaaaaaatacaatggattatgtcacaaaatcgttaacaggcagggagaagcgggcgtaaggggcgttttgattactctgaagagctaaggccataatgcaaaaagggctaaccttacggttagcccttttcagaatgtggtcggcgagagaggattcgaacctccgacccactggtcccaaaccagttgcgctaccaagctgcgctactcgccgaatgcggagcgcatcttactgctgaggtgcgcccccgtcaatcccttattttcaaaaagccattcaactggcgatattctcgccagagcagctactgcgcggcttttgcgctgttatcagggagtttacaccagttgttgttttcgttaatcccaccgttcggtgaggtgtaaccgagacaacccataatagtgtcgtacagctcaacatgacgacgcggcaccttcatttccgcctctttcttcagatgggcaaacatcttcgctttctccgggtcttccagatacttatcggacatccacaccatcattggcacgcggaactgctccggcggcgccatcttgcgtggcgtaccgtgcagatgctcgaactcattgatagattcaccgtggtccgccgcatagaagacaatagccttcttatcgcgaacctggtcaatcaccgtatcaataaagtgatccacatacatcacggagttgtcataagagttaatcaactgggctttggtgcagtctttatccactccgacgcactccggcgtccatttggcaaagctgcgcgggtagcgctgcgtgtagttaaagtgcgaccctttggtatgaaggatgatcatatgcttaccatcagggttcccgttgagtgagagtttcatctcatcaatcagcaacatgtcatcgacaggtttgccacggttgcgcgcctctgcgccaatctgctcgcggtaggagatgttttgcgccatggtgttgctgtagaaccacatctcactctgcatcgcatagaggtcggaggtaaacccaagctgatgcagcaccgagaagacgttttgctcttttagcgtacgctgcgggttatcgctcgccccgccctcgcgcacaaacatgcagcgcagggaaagcttggtggcggtatcacaggaatagccacgataggcaatcaggttcttttcctgcgccagtttaggcgtggtatcacggttatagccgagaatgcccatatgatcccagcgtgtggtctctccgataataaagacgacgtaggtatcgtcaatatcctttggcgccacataggtaaacttcttcgccgggtttatcagcgacttattatccgaggactcatccacctgcgcccacgcatacagccccagcgcggagatccagttagacggtaaatacgagttggcaaccacgccaccgtagctcggcatatccacgccggaggtacgctcatcattcttctgcttcacctccagcagacgaatcggcccccagaccatcaggcccgccagcagcaccacggcgacgcttctgaatcgctttcctggcgtgcggatctggtgaacaagggtatagcggcagcggttgctccagatgagcagcagcggcaaggcgctgacggccaccagccagaggataaagtgcagccccacaacctctttagagaggtcgatatccgtggtcatcaccgaggcaataatgccgtagccaattaccacgttcataaaggtcatgtaatagctggcacccgccgagcacagcacgataaacgttgccagcactcgccacacgcgacggccaaacagggtaagaatacggaataaaaagaaggtgaccagtaccgcagcgaccaattcgacaaccgctgcaattcctttccagacggtaaaatcatgcgcgtaaccgtcaaaccgacggaaaaaaactgcgccgttcataaacaggccgatgtacaacgccagcaaaaagcagagcttttgttgcgccatcgatttaatgtatttcatgcaagctacccggaaaaagggacagtaccgccgcccacctctattaaaaagtgggcagattagacatacgctcaggggatcgttcaatgaaacgtctacaggcgtggtaagtagaccacagggaagcggaaaagtggcagcagagagtgtgatcagtacagttatttacaaaaaagcaaatccaaaaacagacaaaatcgctttatttccaggttaagaaaataaaaaggccggattaccggcctttctcgtcgcgattatgcatgaacttctttaaaaacttcacgttgcggctggcgaatcgtggttgacagcgccagggagataatcagcaaggcaaatatcacgcagaaggttatgtagaacccgccgaacagtgaagcaatcagcgagccacagatactgccgatcccgaagcccagatagatcacgccgtagtttttcgccagattgttcaggccaaagaactcgctcaccagtgacgggaagacggtaatggtgccgccgaagttaaaggccacgcaggcaattgccgcgaagaaggtggcttcattcagcggagcgaacagcagcgccgccataccgaccagcgaaaccacctgcccaatcgtaatcacgcggatgcgggcgattttgtcggacagaataccgaggaccagacgaccggagaggttagcaatggagatgacggtcaccgcgttggccgccgtggctgcatccagtttcaccatcccctgtgcgatatctttcgccacgccgatgacatacaggccgctcatgcaggccgtcaggaacatcaccgccagcatccagtactgcggtttacgcatggactgcgcgagggtgaaatcattctccaccacgccattcacggatttcacttcctgctgcggcgcatccttcatcagcgtggcgccgaacagaatcatcaccagcacgattgcgccccagatcatgaaggttttttcgaggccaacggacgccagcagatgggcatcgataaatttgaacccgaggctgcccaaaccataagaaccaatggcaaacgccgagattaagcctttacgttccgggaaccacttcacgcagtttgacagcgtcagcagatagcccgcgccgtccgccagtcccaccagcacgcccgcactcagccagagcatcatcaggttgctggaatgcgcggtcaggaaaaagcccagccccaggaggatgccggacgccatggtcacgcgcttcacgccaaaacgctcctgcagcttgcccgcgacggaagatgaaatcgccagacccaggctcagcaaaccaaaggagaacgcgacctggctgaccggtgcgccgagtttgtcagaaagcgcactgttaaacaggctccaggtatagaccgatcccagcgcaaactgagtgacgatggtgccaaagagcgtgagccagcgcgtgcggttataggttgatgtgttcatggcagttgtcctgcaagataaattgagggaattcgctgaggacaacgataaacaaaacctcaatatgcctggggtaaaacggcatgaaatgcaggcggaacggaatgaaatgcctggaatcgggaatgaatgacctggcacgggaataaagcgacagcatgttagtatctgctatcgctgtaaagcccgtggttattgtattcgagatgttatcgtaacgtttaaaaaagtaacaacgctagaaattggcgctgacgccgagggtgtataaaaactcctcaccggtggtggtatgctccccctgagccagcgaggcataggccgccatgtgcgtattaaagggaatatccgttcccacggtgacatccatccagctgccgttttgggcaggagctggcgtttgtggcataccaaactgcgatttccactggttttcaccaaactgttggttatagctgatctgcgcccagggccggagatcgccgtactgggtgttaacgcgccaccccagcgtgctgacgctggcatgccagagcgggtccgtaactgactgtgtcgacgcgctatcaccaaactcgttgatcatcatgggagccgtgccgtcgtaccgccacgccaccaccgggccggtggtaattcgcgctgaaacgggaaaattccagcctacgctcatcgccccctctgtcgtgctgccagacggtatattcagagcaagacccggcgcattttgcgaagactgaatacgctccgcgagaatatcctcatagcgcggttggtgatccgcgtcccatgtatagcgttccgccgtattattttgggcgtctgaaacgatatattcctgttgccaggcagacgctgtattacaaaaaaacaggcaggctgaaatccccaccagaccagacacagcatggcgaccactgatttttttttatcatcttcaacgcgaccccagagagagccgaattcggcgatatttgtcgttattcaggaagagcttagagagcatatggccctgtattaactattgtctttatagtaaacacgtcaagccagtcagaacgaaatttttgcgaaatcagtatcaataagggagatgacggatggaacgttgcggttgggtaagccaggatcagctttatattgactatcacgatcgggaatggggcgtgccggaaagggatggcaaaaagctctttgagatgatctgcctggagggccagcaggcggggttatcatggattacggtactgaaaaaacgcgaaaattaccgcagcgctttccaccagttcgaccccatcgccgtcgccgcgatgaccgatgaggacgtcgagcgactggtgcaggatgccggcatcatccgccatcgcggcaagatccaggccatcatcggtaacgcacgcgcttatctggcgatggaacaaaacggcgaatcattttcagattttgtctgggcgtttgtgaataacgatccgcaagtcacggaggcgaccacgctcgcggaaattccggccgccactccggcctcggatgcgctctcgaaggccctgaaaaaacgcggctttaagtttgtcggctccaccatctgctacgcctttatgcaggcctgtggcctggtcaacgaccacgttaccggctgcttctgtcatccgggaggccatcatgatccgcaaatggcaaaatgaaaataccgcgccgctgctgagcctgtggctggaaagcaccacggaagcgcatccgttcatcgcgccgaattactggaaagagaatgaggccatggtgcgggacgtttatctgccgtccgctgaaacctgggtctgggagcaggacggcgaaccttgcggatttatcagcgtgatgcagtctcagtttgtcggcgccctgtttgtggcgccgtcatgcatcgggaaaggcatcgggcgcgcgctgctgaaccatgttcaacagcgcttcccgcacttaaccctggaggtgtatcagaaaaatgtccgggcggtgaatttctaccatgctcagggctttcgcattgaagacagcgcctggcaggatgacacccaacacccgacgtggatcatgagctggcaggcggatcaaacgccgttaaggtaagctcgggaccctcatatttctcgacccaggccagcgccgtgttccctgcgcagccattccccagcttcgagctggggagatctttggtcagcacgttaaccgccccgtttttacagataccaccttcggcgagctcaaggtcaggccatgcgccctgatgaatgcagatcacgcccggcttaatcccgtcgctcaccaccgcccctgccagcacctgtccacgcgcgttccagacgcgcaccacgtcgccgtccgcaatcccgcgcgcttgcgcatcaagggtattcagcgtgatgggctctcgcccggcgaccgcatactgctcgcgcagggaggtatagttaagctggctgtgcagacggtgcgcgggatgggcagataatacctgcagctgatccggccgggcgttgccgtgccattcgtccggctcgagccacgtgggatgcggcgggcagtcagcatagccaaagctggcgatgcgctcgctgtagatcactatcttgccgctctcggttttcagcgggtggttctccggatcgcggcggaaatcggcaaaacgaacaaacttcgcgttctgttcgctctccggcatttcgacgatctggttcgcctcccagaactcagtaaatggcgggagcgtcacgccctgcgccgcgccgcgctgcccggcaatctggtagaaggtttccagccattcgagatcggtttttccctcggtaaaacgcgcgcgaccgcccgcttcccaccgctcgctcagttcagcaaacacgtcgaaatcatcacgcgcctcatcgcgcggggccaccacgcgcttcatcgggaccatatgctgattgctgtagtcgccggtcatggtgagatcgttacgctcaaacgaggtggtcgccgggagcacgatatcagcgtgtttcgccgaggcggtccagaagcactctgaaatcaccaccagctccggcttctgccaggcgcggatcaggcggttggtatcctgatggtgcgtgaagttcgacccgcccgcccaccagacaaatttaatatccgggaagtggcggtcgagaccattgtgctgataaaaaccgcccggattttccagggcttcaacaatacgcgccaccgggattttatccacggcgtccacgcccccctgcaccgaaccttgcagagacgccagcaccgccgctttacgcgtggggttaccgccattggcaaagtgataggagagaccaaaaccgccgcccggcgtaccgatctgccccagcatcgcggcaagggtcaccagcatccagtgtttctgctcgccaaactgctggcgctgcatcccccagccggacatcaacatcgtggtgtttttatggaataacgccgccagttcgcggagcttctgcgcagaaacgccacaaatctctgctgcccactctgccgttttggccacgccatccgttttacccgtcagatagtcggcgaatttatcgaagccggtggtacagcgcgtcaggaattcgacatcgtaccagccgttttccaccagggtatgggcgatacccagcatcattgccacgtcggtgcccatatgtggggcaatccactcggcgctgtcgccgaagaaatccagggtttcagagcgcatcgggtcaatgcagatgatgcgcttgccgcttttgcgcagcgcgtcgaaatagccaatgccctgctcgtcgctggcattccaggcaattttcagcgtgttaagagggttagcgctccacagcaccaccacgtcggcatgttccagcaccagcggccagctggtctgctgctggtacacctcgttcccgcccacgacatacggcatgatcgcctgcgctgcaccggtggagtaatcccccagatgaccggtatagccgcccgccaggctcatatagcgctgcagcagcgtcgacgccttgtgcagcaccccgttagagcgccagccgtaggacccggcgaaaatggacgacggaccgtaactgtcgcgaatgcgcttgtgctgggtgtggatcagcgccagcgcgtcatcccagctcacgcgaacaaactcatcctgaccgcgaatgccctgcggcttgtcaggtgaggcgagaaaacctttacgcaccatcggccagcgcacgcgtgttttgctgtgcacctgatcgcgaacgacggtctgtaaagagttgggatgttgtgttggcaatgctccgcgagacgacagaacattttcgccatcggtttcgaccagcatcggcccccagtgggcggcggttagaatggttttcgttgaggtgctcaagcgtgcgctcctggttgcgtgcaggttttacggccttcttgctgagaccgtttatggtttgtcacaaatttcagagttatacccggaattttctccgtatctggacgtcataatcaactgccacgttcgccgtggcaaagaataaaaaggattaaggaaagaagatgaaaaaacgcgtactcgttattgccgctctggtgagcggtgcactggctgtttctggctgcacaaccaacccttacaccggtgagcgcgaagcgggtaaatccggcattggcgcaggtatcggctcgctggtcggcgcaggcgttggggcgctctcctcctccaagaaagaccgcggcaaaggcgcgctgattggcgcagcggcgggcgcggccctgggcggcggcgtcggttattacatggacgtgcaggaagcaaaactgcgcgacaaaatgaagggaaccggcgtgagcgtgacgcgcagcggcgataacatcatcctgaacatgccgaacaacgtcaccttcgacagcagcagcgcaacgctgaaacccgcgggtgcgaacacccttaccggcgtggcgatggtgctgaaagagtacaacaagaccgccgtgaacgtgattggctacaccgacagcaccggcagccaggatctgaacatgcgtctgtcccagcagcgcgccgattccgtggccagctcgctgattacccagggcgttgaagcaaaccgcatccgcaccagcggcatgggccccgccaaccctatcgccagcaacagcacggcggaaggcaaagcgcagaaccgccgcgtagagattacgttaagcccaattcagtaggtaaaagcaaaacggcaaccccgttgccgtttttagtgtttgcgccctctcccgtgggagagggttggggtgagggtatcaggccgcaacctccggtaagcgcagcgccaccgggcaaattacttgattcgtccgattttcccgctaaggtattctcactaaattcagggaaatcagcgatgagcaaaccagcccgggccaccatcagcgacgtggcgaaagccgccaaaaccggtaaaaccagcatttcgcgctaccttaacggcgagaaacacctgctgtccgatgcgttgctggcgcgtattgaacaggccattgccgatctcgactaccgtcccagcctcatggcgcgcgggctcaaacgcggccgcacccgccttatcgggctgatcatcgccgatatcaccaacccctactccgtgaacgtgctcagcggtatcgaagccgcctgtcgcgagaaaggctttacgccgctggtctgtaataccaacaacgaagtcgaccaggagctgcattatctggacctgctgcgcagctatcaggtggaagggattgtggtcaacgcggtaggcatgcgtgaagaaggcttaaatcgcctgcagcaatcctccctgcccatggtcctcatcgaccgtaaaatcccggagtttgcctgcgacgtggtcgggctggataacacccaggccgccacgaccgccaccgaacatctgattgaacagggcttcgaggccattctgtttctgagtgaaccgctggggatggtcaacacccgacgtgaacgcctgagcgcatttcgcgccacgctggagcgttatcccggcgtgatcgccgaaaatgccgaaacgccgcttcacgaagccgggcagctcgacaataccctgcgtcagttccatacgcgccatcgtgggatgcgcaaagcggttatctccgccaacggggcgctgacgctgcaggttgcccgctcgctcaagcgcattggcctgcactggggcagcgacatcggtctgctggggtttgatgaactggagtgggcggagctggctggcgtcggcattactaccctcaaacagcccacctggcagattggctatgctgctgttgaacaagtcgttcgtcgtattgaaggcaccagcgatgccgttcgcgagcaggtcttctccggcgagctgatcgttcgtggctccaccgcgcgttaaatttcccttgtgatagcgatcataaattcaacatcctgaccttttctttggaaccggttccatctagcgtaatagtattgatatgttgcgatggagtccgaagatgggcaggaaaattatggtggtcaccgccgcgtacggtgcggaacaggtgcgacaggcgggcggtcaacgggcgatgctccccgttattgctggcgcgggggcagacggcgtggagatccgccgggaactgttcaacagcgaagagctgctggcgctgcccgcgctgggcgaatccattgagctgctgggtctgctggcgtgctactccgcacccgccgccctgtttatgcccgacggcaccctcaacccggacctgccccgctatctttctgaagccaacaccctgaacgcactttggctgaaggtttccctgggccatttcagcgacacgcaacctctggacgccctgcgtacgctgctgaataccagcggcatggcgctggtcgtggagaacgatcagaccgactgcggacagctcgcgcccatgcagcgcttccaggccgcctgtcgggaaatggcgctccccgtcacgctgaccttcgatatggggaactggctgtgggtgggcgactcccctgaagaggccgcgcgtcacctggcccctgccgtgagctatatccacgtgaaggccgccgtgccgcataaagataacttccgcgccgtggcaccggaccgcgccgatgcgcgctggctggatctgctcggccagctgcctgccgatgccccgcgcggtatcgagttcccgctggaaggggcggatttaaccgccgttacccgccattacgtcaacctgctgcgcgaggagtaaaccatgcacaagacgctggatgtcatcacgatcggcgaggccatggccatgtttgtcgccaccgaaacgggcgagctgagtgcggtggagcactttatcaaacgcgtcgcaggcgctgaactcaacgtcgcgaccggcctggcgcgtctcggcctgaacgtgggctgggtcagccgcgtgggggatgacagctttggccatttcgttctcgattcgctgaaaaaagaggggattgatgctgcaggggtcaccctcgacggacgcttccctaccggctttcagcttaaatccaaggtcgaaaatggaaccgatcccatcgtggagtatttccgcaaaggctcggctgcaagccacctttctgtcgcggattaccacgccgattactttgcctccgcgcgccatcttcatctgagcggcgtggcggccgcgctgtctgccagctcgtatgagctgctggatcatgccgcgaccaccatgaaagcccaggggaaaaccctatcgttcgaccccaacctgcgtccggtgctgtggaaaagcgaagcggaaatggtggagaaactgaaccgtctggcgttccgggcggactgggttctgccaggcctgaaagaagggatgattctgaccggcgaaagcacgccggaaggcatcgccgacttctacctgaataaaggggtaaaagcggtggtgctgaagaccggtgccgatggcgcgtggtttaaaacggccaacggcgagcagggcgcggtcgcggcagtgaaggtcgagaacgtcgtcgacaccgtcggcgcaggcgacggctttgccgtgggcgtgattagcgccctgctggaaggtaaaacgctgccgcaggccgtcgcgcgaggcaacaagattggctcgctggccattcaggtgcagggcgacagcgaaggattaccaacgcgagcacagctcggcgtttaaattccccctccctgtgggagagggccagggtgaggcagcaagccgcaccagataattaagccaccgtgtaccctacagacaacggcggtaacaacctcaacaacagaggcaagcctatgaacagttcgaccaatgcagtaaaacgctggtggtacatcatgccaatcgtgtttatcacgtacagcctggcgtaccttgaccgtgccaacttcagcttcgcgtccgccgcagggatcaccgaggacctcgggatcaccaaagggatctcctccctgctgggtgcccttttcttcctgggctacttcttcttccagatccccggcgcgatctatgcggaacgccgcagcgtgcgtaagctgatcttcatctgtctgatcctttggggtgcctgcgcgtcgctgaccggcatggtgaacaatattcctgccctggccgccattcgctttatcctcggcgtcgttgaggcggcggttatgcccgcgatgctgatctacatcagcaactggtttaccaaatctgagcgctcgcgcgcgaataccttcctgatcctcggtaacccggtcacggtactgtggatgtcggtggtgtccggctacctgatccagtccttcggctggcgcgagatgtttatcattgaaggggtaccggcaattatctgggccttctgctggtgggtgctggtgaaagataaacctgcccaggcgaagtggctttccgaagatgaaaaagcagcgctgcaggcgcagctggacaaagaacagcaaggtctgaaggcggtgcgtaactatggtgaagccttccgctcgcgtaacgtgatcctgctctgcgcgcagtactttacctggagcattggtgtgtacggctttgtgctgtggctgccgtccattatccgcagcggcggtgaaaacctcggtatggtcgaagtaggctggctgtcatccgtaccgtatctggcggcaaccatcgcgatgattatcgtttcctgggcgtcggacaagctgcagaaccgcaagctctttgtctggccgctgctgctgattgccgccttcgcctttattggctcctgggccgtgggcgtaaaccacttctgggtctcttatacgctgctggtggttgccggtgcggccatgtacgccccttacggaccgttctttgccatcatcccggaaatgctgccgcgtaacgtcgccggtggtgcaatggcattgattaacagcatgggggcgctgggttcgttctgcggctcctggttcgtcggctacctgaacggtgccaccggcagcccatccgcatcgtacatctttatgggggtggcgcttttcgcctcggtatggcttactctgattgttaagcctgctaataatcaacaacaccctgtcggcgctcgccacgcctgaatctttaaaaaatcaacggagattagcatgaagccgtccgtcattttgtataaagccctgccggaagatctgcagaaacgccttgaagagcacttcaccgtcacgcaggtgaagaacctgcgcccggaaaccgtggcacagcatgccgacgcattcgcgagcgcggaaggcctgctgggttcaagcgaaaaagtggatgtcgccctgctggagaaaatgccgaagctgcgtgctacctcaaccgtttccgtgggttacgacaacttcgacgtggatgcgcttaacgcccgcaaaatcctgctgatgcataccccgcatgctctgacggaaaccgttgccgatacgctgatggcgctcatgctcaccacggcccgtcgcgtggtggaagtggctgagcgcgtcaaaacgggcgaatggacaaaaagcattggtccggactggttcggtgtggatgttcacggcaaaacgctgggcattgtcggtatggggcgtatcgggctggcgctggcgcagcgcgcccattttggttttaacatgccgattctgtataacgcgcgtcgccatcacagtgaagccgaagaacgcttcaacgcccgttactgcgagctggatgccctgctgcaggaagccgattttgtctgcctggttctgccgctaacggacgaaacccgtcatctgatcggcaaagaggcgtttgaaaaaatgaagacgtccgccattttcatcaacgcgggtcgtggcccggtggtggatgagaaggcgctgattgaggccctgaaaaacggtgagatccatgcagcaggtctggacgtgtttgagcaggagccgctgccggtggattcgccactgctttcgctgcctaacgtgattgccctgccccacatcggctcagctacccatgagacgcgctacaacatggcggccaccgcggtcgataaccttattgccgcccttagcggaaaggtggagagaaactgcgtgaacccgcaggtgcaacggtagaaacgaaaaaacccgccagaaggcgggtttttaaattctttgctactgggttggaagcttacaggcttacaacgttaccagctgctgggcctttagcgccgctttcgatggtgaaggacactttctgaccttcgtccagagatttgtagccatcgttctggatagcagagaagtgtacgaacacgtctttagagccatcgtcaggagtgatgaagccgaaacctttatcagcgttgaaccattttaccagaccagtcattttagcagacatagaaattaccttattaacaaatatattgtgccttccggcttgatggattgcgttacagatttttaagcgatgaaggaagggtcactacgaagggtatctatggataacaatctggactgctttactaaactgctttaggtctgtgtaacaaaccgacgggaatagttataccgatgtggtagaggaatgacaagcgttattttcgcaacgcataaaaaaaccccgccagaagcggggttttttcggtttattctgtggcagcgactgcggcactccaggcctggctaaaggcctgatgctgggaggccagcggcccaatcagcgtattgtactggcttgcctgctgggaggtcgggaactgaataccgttggcaacaaagcttacctgcgtattctgctgggcaataaagtcacccacctggaccagctgctgcgtgaagatttgcgcggccggaatcaacggctgcagtgcttctgacggtttggtcaccactttctcatacactttgtcgaagaccggtttgagatcgtcgccctgcttcagcgcagaacgtgacgcgtcagcctgcattttcgcattctgcagctgctggctcagcacgccaagcgcaccgttggactgacgcaatggttcacgctgcgtcatgtaatcctgtggaacgcggatggcgttcacgctatccactaccgggcggataccggagtccatcgcctggctcacctgctgtgaataaccataaagaatggcgtaatcggacacaaaggggccaaactgttttttctgatccgcagtcagcgttggcaaccgctcgccgctgcgcatcactgtattctgcagaaaatcgataaacgctttgcgctgatcgccttctttatcaaaacacccactcaggctaacaaccatcaacaacgccgcaataggcgcaaaccagcgagagcaggactttcctgtcgccattttattactcctttcacccaaaaaagcgcacaccggcacacgcgtgcccgacgctgacaaggatagtccaggtcagccttgcaagatactcttttcatgcaaaacggctattgccgatttatttcttaccatttacaaaaaaatacctggcgaagccgacatatgactaatcagggaattagcataactctccatattgctgaatcggatacagcgatcgttaccgcacgattaatcacacccgtgacgatcctgggttggtattagggactattcttaactggctctctgatgttcttgatcacgatgtgagatttaagaggagtcctcaatggaatataaagatcctgagtttgagctgctgagcagcctggaacagatcatttttaaagatgtaccgcagacgattaccctgcaacaaaaatccaatccctttacagaatatgagcaattgcgcaaagggacaggactgaaaactgaagaattcgccagagcgatgggtgtcagcgtggctatggtgcaggagtgggagtcaaaacgtgagaaacccaccccaaccgagttacggctgatgcgcctgattcaggccaaccctgcactcagcaagcagatcgcgtagtgaagattgaatgcccccgcctttgcgggggcttgtgttttacaggctatcacaacgccaccccgcctcttcccacaccagctcatgcgttaacgttaagccgcttaaaaacgcctcatcgtgtgataccaccagcagtgccccagggaaaccggccagcaccgcttcaatggcctggactgaagccagatccagatggttggtcggttcatccagcagcagaagctgcgtggcctccgcgcgccacagcacgcaggccagggcagccttaagacgctcaccgccgctgagcgtcgccaatgggagcatcactttgtcagcccccagttgaagctgcgctaaacgggttcgcaataccccctcttccagaggggtatgactcaaattgagatgcgtcatgaccgactgcgagagatcgaaccgggagagatgctggtcgagataagcgcagctgacggacactttacagctacccgaacggggagccatctcgccgaggagggtttttaacagcgtcgacttcccgcagccgttcggcctctttaacgccacgcgcatcggtccgtccatccgccagttgagcggaggaacaggtacatgctgcagcaccagatcctccagcaccagcacctgcttcccctccgggatctgacttcccggcagggtgaacatgaccgggttatcgtcttcaacccgctcacgcgccttgttaaccgcggcgttcagcgcttcattttgctcgctgtgctgttttttccaggagccaatccgctcctttgccgcgcctttatatttgacccgctcgaacgatgcgatattcagggtatcgacggtgcgtaacgtctttgccgaccgccgctggctgtcatcatgctctttttgcatgcgcgcgcgggtgcgtttgcgctcggttgccgcatgttccagcgccgcgcgggcagcctgctgttcggcatcgcgctgggcttgataatccgcataatttccgccgtagctgcgcagacccgaggcgctcagctcaagaatacgcggcaccttcgccagcagttcgcggtcatgggaggccaccagcacaccgccctgataacgggcaagctggtcgtagaaccacgccctgccttgtcgatcgagatggtttgtgggctcgtccagcagcatataatccgcttcagcagtaaatgcaccgcacagcagcgcgcgaatgcgctcgccgccgctgagctcgccggctggcttataaggatcaaacggcggaagttttgcccgggtaaatgcctcgcccagacgttcagctaaatcccacaatccatcaagcgtttccagatcgtcaggctggtaatcaccgctgtcgatgcgcgctcgcgccgcgaagatggcctcgaacccgagcagttcagccagcgtcgtgtgcggcaaaatgtcctgctgctgagccacataaacatgtgttccggtacgttcgatatgcccgcttgcaggctcatcaagccccgccagcagacgcagcagacgcgttttcccgctggcgttgcggccaaccagcgcgcacagggaggactccagagaaagattcagcggaccaaaaagggtatcgcccgtcggaaactgacaggtgacctgatgcaaaataaaagaaggggactgcgcaaaatgagccataagcactcctgaatgaaatcaaaacatcccctgccgacgcggtggcgttttagcaaggatcgaaattcatcagtcgtgtttgttcatttttggggggcactccagcgcgagaaagttaacggggataaggatagcggtaatgggttgaccatttcaaggttaaattttcagcaacacactataaaaaaacccgccgaagcgggtttttagcatttgtcacaacgggcacattactgcagcagcgaaatatccgccacgcgcaggaacagctcacgcagtttctcgagcatagagagacggttaatacgcagctctttatcttctacgtttaccatcactttctcgaagaaggcgtcgatgacgtcacgcagctcggccagctccaccagcgcttcctggtagcgaccttccgcgaagaccggctcgagcttgtcgcgcagcaccacaacctgcatcgccagggcaatctcttccggctctttcagcgtcgcggcgtttacgcgctcgttcagcgtctcgtcggatttcgcgaggatgttggagacacgcttgttggccgccgccagagcagatgccgcttccagcgtacggaagtgggaaaccgccttcatacgcgcatcgaaatcagccggacgggtcggacgacgcgccagcaccgcctgaatggtgtcgacggtgtaaccttcatcctgataccaggcgcggaaacgaccgagcataaagtcgatcacgtcatccaccacgttggcgttggtcagcttgtcgccgtacagacgcaccgcttcttcggtcagggtctgcagatccaggttcaggttcttctcaacgatgatacgcagcacgccgagcgccgcacgacgcagcgcaaacgggtctttgtcgcctttcggatgctggccgataccgaagatacccgccagggtgtccatcttatcggcaattgcgacagcacaagctaccgggttggacggcagttcgtcacccgcaaagcgcggctgatactgctcgttcagggcaaccgccacgtcttccgcttcgccatcgtgacgcgcgtagtgcatgcccatcacgccctgggtgtcggtaaattcgaacaccatgttggtcatcaggtcacacttggagagcaggcctgcgcgggtcgcgtggttaacgtcggcaccgatttcacgagcgatccagccggacagctccgcaatacggtcggtcttgtcgcgcagcgtacccagctgctgctggaacagtacggtctgcaggcgtggaagatgatcttccagacgctttttacggtcggtgttgaagaagaactcggcatccgccagacgtgggcgcacgaccttctcgttaccggagataatctggctcggatctttcgattcgatgttcgccacgaaaatgaagtttggcagcagcttgccgtcgttggcatagaccgggaagtacttctggtcacccttcatggtgtacaccagcgcttcagccggaacggccaggaatttctcttcgaacttcgcggtcagcacaaccggccattccaccagcgaggtcacttcttccagcaggctgtcgctcagatcggctttaccgccaatcttacgcgccgcgtcttccgcgtccgctttgattttggctttacgctgttcatagtcagcaatgaccttgccgcgctccagcaggatttgcggatactggtcggcattgtcgatggtgaactcaggctcgcccataaagcggtggccgcgaatcacgcgatcggacgccacgcccaaaatggtcgccggaataacggtgtcgcccagcagcagggtcacggtgtgaaccggacgcacgaagtgcacgtcggacgcgccccagcgcatcagcttaggaatgggcagcttcgccagagacgtggcaatcatgtccggcagcagcgcttccgcgctttcgcctttcacatgggcacgatacagcagccattcacctttatcggtggtcagacgctcggcctgatcgacggtgatgccgcagccacgcgcccagccttccgccgctttgctcggcttgccttccgcgtcaaacgcctgggcaatcgccgggccacgtttttcgacttcgcgatccggctgagacgccgccaggtttgccactttcagcgccagacgacgcggagcagcaaaccactcaattttaccgtgcgccaggccagcgttatccagctcggcggtcacgttcgcagcaaaagattcagccaggctgcgcagggcttttggtggcagctcttcggtgccaatttccaccaggaaagttttctcagacatggccgcctcttatttgtttcggttgcacatcgggaagccaagggcttcacgggacgcatagtaagcttctgcaacggctttggtcagggtacgaatacgcagaatgtagcgctgacgttcagtcacggagatcgctttgcgggcgtccagcaggttgaagctgtgggcggccttcagaatacgctcgtaggcaggcagcggcagcggagtctccagcgccagcagctgctgcgcttctttctcatactgctcgaagcaggtgaacaggaagtccacgtccgcgtattcgaagttataagtggattgttccacttcgttctgatggaacacgtcgccgtaggtggttttacccagcgggccgtcgctccagaccaggtcgtaaacgctgtctacgccctgaatgtacatcgccagacgttccagaccgtaggtgatctcaccggtgatcggcttacattccagaccgccaacctgctggaagtaagtgaactgggtcacttccatgccgttcagccacacttcccaacccagaccccaggcacccagcgttgggttttcccagttatcttccacgaaacgaatgtcgtgaatggtcggatccatacccagctctttcagcgacccgaggtacagttcctgaatgttgtcgggtgatggcttaatcaccacctggaactgatagtaatgctgcagacggttcgggttctcaccgtaacgaccatcggtcggacgacgggaaggctgcacatacgcggtcgccattggctctggccccaacgcgcgcaggctggtcatcgggtgtgaagtgccggcgccgacttccatgtccaaaggttgaacaatggtacagccctgacgagcccagtaatcctgtaaggtcaggatcaggccctggaaggtcttggtatcaaacttttgcatagtatttcgtgctggatacgtgtggttttaaatggaagggaccagtatacccgctggctgcaagatatacagtatgaaacggggttgtttagggaaaattgggaaataagcattcacgccagggcgctgccggcgtctggctgttgattatgcgagcaggctagcgcatggagaggtgtaaaaactggccgtccgcatcaaacgagcagacaaagccttctttacgcgccgtatagcccttgagctcatagctgccctgaaagcgctcaaacccggtgacgttgattttctgcacgtccgagttatagcggcgtgcggcctggtccttgcaaagtgactccatattcagtgaacgttccgggctcattctgccttgctgggctttttgcactggtgcttcttgtggcgcactgcatcctgccagcatgaaaagcagaaagagtgatgccacacgcttcatcatcatttttattaccgtcctggtcagtggctgttatttttagtatcaacacgtttatagattatggtcagccattctgcgaatctcgcggtctcccggcaagcctgcgaataaaactcagaattttccaaacgaagacttttggacaatgggagtcacattcactttacagggaatacgaggaactgatgccgtcaaaaattaactggattgataacctgcgaggaatagcgtgtctgatggtggtcatgatccacacgacgacctggtacgtcacgaacgcccacagcatcagccccgttaactgggacatcgccaatattctcaactctgcgtcgcgcgtcagcgtgccgctgttcttcatgatttccggctttctcttttttggtgaacgcagcgcgcagccgcggcacttcatccgcatcgcggcctgcctggggttttacagcgccgttgccctgctctatatcaccctgttaacctccattaacgccggactatcgctaaaatacgtgctgcaaaagccggtgttctaccacctgtggttcttcttcgccattatcgtgatctatctggtctctccgctcattcaggtgaaaaacgtcagcgggaaaatgcttctggccctgatggtggtgattggcattgtcgccaacccgaatacggtctcgcagaaaatcgacggatttgagtggctgccggtgaacctctatatcaacggcgataccttctattacgtgctttacggcatgctggggcgcgccatcgggatgatggacacgcaaaaacgcggtctgaactggctctgcggggcactgtttatcgccggcgtggcggtgatttcacgcgggacgctgcatgagcttcaatggcgcggtaattttgccgatacctggtatctctactgcgggccgatggtctttatctgtgccgtatcgctgctcacgctcgttaaaaacaccctgaatgcgcgtccccttcccgtactgagcgtcatttcacgacactctctcgggatttacggttttcacgcgctggtgatccacgcgcttcggacaagaggggttgaactaaaaacctggccggtgctggatatcatctggatttttgccgcgaccctggcgatcagcctgctgctgtcgatgctgctgcaaaaaatagacgttcgccgcttcgtcagctaacgcttcgctgccgggcgcgatggtactggcgcggggaggaaaaccctgccgccagggaagcctgctccacgccgcgcccctgcaatagccactgttccgccaccgccagacgctgctgctccagataatcgcggacgctaatccctaaatgtgtctggaaaagccgggtgagatggcgcgggctgacgtgcgccagcgcggcgatatcaggcaagttccacgctttttgcggctcggcggtgagcgcatcctgcgcccgatgaatcgccggatgaagatgattgcggtagcgtagccacggggagagctggggatcgtcaccagaacggcggaaccagaccaccatctcgcgcgccacattcagcgccttttcggggccgcacaggcggttaatcatatgcagcgccaggtcgatgcccgacgtgatccccgcgctggtccagatgttctcgtcctgcacaaagatgcggttttctttaatcgtcgccgtaggggccgcggtgcgtaaacggctgataacgtcatggtgagttgtgcactgtttgttattcagcaggcccgatttcgccgccagcagcgcgccagaacagacgcacatcaccgtgatatcccggcgctgaataatcggctgcaggcgcatcagccagtgctgtatccgtaacgcctgcggcgtcgaaaactgagagcgggagtcactcacgccgggcaataccagcaggctcccctcgggaagacgttccggcagcggctgaatgccgctcatcgtcagacctatcgacgtcggcacgtcaggttgcgggccaatgtaatgcagacgaaacgcgtcgccagccagcacaaaggtttctgccgggcccgtcatatctaatgacagcaccccgggcaacatcacgaaccagacgtcgatgggcattacagtgactccagcgtctccgctaccgttttaatgtcggcaaaacgcccggacagtaccgtttcggtacggtggcgaatgtccgctgcgctaagggtaatgcccttgtaggtcatggggaacgtcagcgttgcctcgctcacaaaggtcacagcataacccagatcggatgccacccgggcggtggtttcacagcattgctccgtgcgaatgccgcagataatcacactattgatatcacgctcgcgcagccagcgatcgagcccggtatccgtgaaggcattatgaacgtgtttctggaaaaccacatccggctgatgacgcaaaaaggccatcggtttgacatagccgctttccagcgtaaaagggccgtctccatccacatgaaaaatatcaacgaccggaataccgcgcgcctggcagctttcaatcagccccagcatcgcctgctgaaaagcgggaatgtaatcctcctgccagtaattgcggtgatggaaggactgctgagtatcaatgttgatgagtgcaatgcgtgacatgatggttcttctcgccagtgggtgtgacaccatactggcaaggaaaggaaggcacgcacagaccaaaaaaggacatcctcgtgcctcttccggacaagcgaatttacgtcatcagcggcagcagctgctggtagattttgcggaacacgtcgcgcctttccgcgtaccgcgcatggcgcgccgcgtcaggcaaatgtgcctgttcaagcgtaagctgcggcagcagttgtgaaaccggtttttccgggttcatagcaatctgcgccagacgcgcggcgccgagcgcggggccaacatcgccaccggtgcggaaatccagctgcaacccgctgatatccgacagcatttgtcgccagtaagggcttcgcgcaccgccgccaatcagggtgacgcttgcgggtttcaggccgcagtcgtgaaccacgtccattccgtcagccagcgcatatccgacgccttcgagaaccgcacgcgccagttctgccggaccatgctgatgggttaagccaaagaaaacccctttcgcttccgggttgttgtgtggcgtacgctcaccggacagatacggtaaaaaccagacggtaccggcattttcatccgcctgctgtgctgcggcaatcaacgcaggaacatcggccatcccggtcagcttcgccgcccagtccaggcacgacgctgcactcagcatcaccgacatcaaatgccattttcctggcagcgcatgacagaaactgtgcaccgcgctttcgggattgctgcgatagccgtcgctgacggcaaaatagacgccagaggttcccagcgacagcatcgcctgacctgcctcaaccatgccgacgcccacggcccctgcggcattgtcaccgcccccggcaaccaccggcacggcagacatattccagcgttccgcaacgtccggcagcagtgtgcctgttacctcgctaccttcgaacagcgcgggcatgtgttcacgggtcaaatggcaggcatccagcatcgcctcgctccagtcgcgtttcgccacgtcgagccacatcgtgccggcggcatcagacatgtcggaggcaaaatcgcccgtcatgcgaaagcgcagatagtctttcggtagcaggactttcgccacctgccggaaaatctccggctcgtgtcgctgcacccacagaagcttaggcgcggtaaagccgggcatcatcaggttgccggtgatcgcgcgggaagtgggtacgcgtccctcaagaagcgcacactcttctgcacagcggccatcgttccagagaatggcgggtcgcaacacgcgatgctcgctgtccagcaaggttgcaccgtgcatttgcccggcaatccccagcgctttcacgtcacgcagagaatgctgttcacctaacgccttgattgcacgatccgttgcctgccaccactgctccgggtcctgttccgaccacagcggatgcggacgtgaaacctgcagcttttcagtctgcgttgctaacacgtcgccctgctcgcttaacaggatggctttcacacccgatgtgcccagatcgatcccgatatacatatagtggattccttaagtgaaaatgcccggtggcgctgcgcttaccgggcctacaagctggatgccgttatttatcgaacaggtagtgattgaccagattttccagcagctcctggtgcccgctctggtgctgcggcgccagctgatggtgttcagcgtacttcgcgatctccgcaagcgataactgacctttcaaaatttgctggcccagctcactgttccagccgctgtagcgcttcgccacgcgtttatcgagctcgccgtcttcaatcatacgtgccgctaccttcagcgccagcgccatggtgtccatcgcgccaatgtggccgtagaacagatcgtatttgtcggtgctctggcgacgcaccttggcgtcaaagttcaggccgccggtagtgaagccgcccgctttgacgatctcatacatcaccagctcattctcttccacgctgttcgggaactggtcggtatcccagcccagctgcgggtcgccgcggttcgcatcgaccgagccgaagatgcccagcgcaatcgccgacgcgatctcgtggtggaaagagtggcccgccagcgtggcgtggttggcctcaatgttcactttgatctctttttccagaccgaactgcttcaggaagccatacaccgtcgccacgtcgtagtcatactggtgcttcgtcggttcctgcggcttcggctcaatcaacagcgtgccgcggaagccgattttgtgcttgtggtcgacaaccatctgcataaagcggccaatctgctcgcgctcctgacgcaggtcggtgttgagcagggtttcatagccttcacggcctccccacagaacatagttttcgccgcccagctgatgcgtggcattcattgccgtcaccacctgcgtggccgcccagctaaacacttccggatccgggttggttgccgcacctgcgccgtagcgtgggttagtgaagcagtttgccgtgccccacagcagcttcacgccgctttcctgctgttttgccgccagtacatccaccatctgcgcaaagttgttcaggtactctttcagcgacgccccttccggcgacacgtcaacatcatggaagcagtagtacggcacgttcagcttgtggaagaactcaaacgccacatcggctttgcgctttgccagttcgatggcctcacccggctgctgccacgggcggtcaaaggagcccacgccgaacatatcggcgccgttccagcagaaggtatgccagtaacaggcggcaaagcgcagatgatcttccatgcgcttacccagcaccagctcatccgggttgtagtgacgaaatgctaaaggattggtcgttttcgggccttcgtaacgaacacgatcgagttggtcgaaataagcttgcatattgagctccataatcagggtatgcggcgagtcgttgatacaggagtaatagtgaatagacattttgggttgctcaattacgttatttcacactgctattgagagaatgcacaactgtgcgctggctcgcaaaataatgcgcaggcaaactatttttcggcgcggattccagaatcaaatgtaattaagacgttacgtattttaaaatccgatcgcggtcataaattcagaaataaaccaaatatcataatgagaagataaaaatctgtaattgccagcctgcctttccgcgttaaaaatttgctgcgtcccagcagtgaatgtttcttttatctcagcaacacatacccctacaaaaaggcctaataattatgaagataaagaacctgaccctaacgctctgcgccacgctccttctggcaagctttgcaggacatgccaaagaggtcaaaattggcatggcgattgacgaccttcgtctggagcgctggcaaaaagatcgcgatatttttgtcaaaaaagcggaatcactcggtgcgaatgtgtttgttcagtcagctaacggcaacgaagaaacgcaaatgtcgcagatcgagaatatgattaaccgcggcgtcgatgtgctggtcattatcccctataacggccaggtattaagtaacgtagtgaaagaagccaaacaagaaggcataaaagtgctggcctatgaccgcatgattaataatgcggacattgattattatatttcgttcgacaatgaaaaagtcggcgaattacaggcacaaagcctgatcgacaaagtgcctcagggcaattatttcctgatgggcggctcgccggtagataacaacgccaagctgttccgcgaagggcaaatgaaggtccttaagccgtacatcgataacgggaaaataaaagtggttggcgatcagtgggctgacggatggttacccgaaaacgccctgaagattatggaaaacgcgctgacggccaacaacaacaaaattgacgcggttgtggcctccaacgatgccaccgcaggcggtgcgattcaggccctgagcgcccaggggctggcgggtaaagtcgccatttcagggcaagatgccgatctggctggcgtaaaacgtattatcgctggcacccaaaccatgacggtctacaaaccgattaccgagttggccaatacggcggcggaaatcgccgtggaactgggcaacggtaagcaaccaaaagcagacgccacgctgaataacaggctgaaaggcgttccggctcgcctgctcacccctattgaagtcaataaagagaacattgacgccaccgttattaaggacggtttccacaagaagagcgaactgtaatccggcgcggcccctgctctgcgggggcgcatcacgttgtactgttcttccctcgggttatgtggagcagttatgccttatttacttgaaatgaaaagcatcaccaagcgcttcggcacggtgaaagccgtcgacaacgtcagtctccggctaaaccccggcgaagtggtttcgctgtgcggcgagaacggttcaggcaagtcaacgctgatgaaagtgctgtgtgggatctacccgcacggcagctacgaaggcgaaatcgtctttgccggcgaagcgatcctggcaactcacattcgcgataccgaacgcaaaggtatcgccatcatccaccaggaactggcgctggtgaaacatctcaccgtgctggagaacattttcctcggagccgaaatctcccgccacggcgtgctggattacgacaccatgacgctccgttgtgaaaagctgctggcgcaggtgagcctccacatttcaccggatacccgcgtgggcgacctgggcctggggcaacagcagctggttgaaatcgctaaagcgctcaataagcaggtcaggctgctgatcctcgatgagccaacggcctcgctcaccgaacaggaaaccgcggttctgctcaatatcatccgcgatctgcaaaaccacggcatcgcctgtatctacatttcgcacaagctgaacgaggttaaagccatttcggacaccatctgcgtgatccgcgatgggcaacacatcggcacgcgtgaagccgcgggcatgagcgaagatgacatcatcaccatgatggtggggcgcgagctgacggcgctctacccgaatgagcctcacaccaaaggtgatgaagtgctgcgcgtggaaaacctgaccgcgtggcatcccgttaaccgccacatcaagcgcgtcaataacgtttcgttttctctgcacagcggcgaaattctcggtattgccgggttagtcggcgccgggcgcacggaggccgtacagtgtctgtttggcgtatggccggggcgctgggagggcacgatttatatcgacggccagccggtgaaaatcgacaactgccagcaggcgattgcccacggcattgctatggtgccggaagaccgcaaaaaagacggcatcgtgccggtcatggccgtggggaaaaacattacgcttgcggcactcgatcgcttctccggcgcgctgagcagcctggacgatgccgccgagcagcagtgcatcctccagtcgcttgcacgtctgaaggtcaaaacctcctcaccggaactggccattggccgcctgagcggcggcaaccagcagaaggcgattctggcgcgctgcctgctgctcaacccgcgcattttaatccttgatgagccgacgcgcgggattgatatcggcgccaaatatgaaatctacaaactgattaatcagcttgtacagcaagggattgccgtcattgttatttcgtctgagttacccgaagtgctcggcctgagcgaccgtgtgctggttatgcacgagggaaaactgaaagccaacctgattaaccagaacctgacgcaggagcaggtgatggaagccgctttaaggagcgaacgtcatgtcgaaaagcaatccgtctgatatcaaagtcgccgttccgacgcccggtgcgttcgcagggctaaaagcgctgaacctgcaggtgttcgtgatgatcgcggccattatcgtcatcatgctcttctttacctggatgacggatggctcgtacctgagcgcgcgtaacgtctccaacctgctccgccagaccgctatcaccggcattctggccgtgggcatggtgctcgtgattatctccgcggaaatcgatctgtcggtcggctcgatgatggggctcctcggcggcgtggcggccatttttgacgtctggctcggctggccgctgccgctgaccgtggcggtcacgctggtgctgggtctggttctgggggcctggaacggctggtgggtagcctaccgtaaagtgccgtcgttcattgtcaccctggcggggatgctggccttccgcgggatcttaatcggcatcaccaacggtaccaccgtctccccgaccagcgcggccatgtcgcagattggtcaaagctatctcccggatggcgtgggctttaccatcggcgtggcggggttgctggcgtttgtcgcgtggcagtggcgtggacgcatgcgccgtcaggcgctggggctggcgtcgccagcatcaacctcggtggtgggacgtcaggcgctgacggcggtcattgtgctgggcgccatctggcttcttaacgactatcgcggcgttccgacgccggtgctgctgctggcgcttttgctgctgggcggcatgtttatggccacgcgcaccgcgtttggccgtcgtatttatgccatcggcggcaaccttgaggctgcccgtttgtcggggattaacgtcgaacgcaccaaactcgcggtcttcgccattaacggcctgatggtcgccatcgccgggctgatcctcagctcgcgtctgggggcgggttcaccctccgccggtaatatcgccgagctggatgctatcgccgcctgcgtcattggcggcaccagcctcgcagggggtatcggtagcgtggcgggcgcggtcatgggggcatttatcatggcgtcgttggataacgggatgagtatgatggacgtcccgacgttttggcagtatatcgtcaagggagccattcttttactggcagtctggatggactcggccaccaagcgacgggcctgataacggtattgtgacttaattgggaagtgagccatgtttgaaaagcgtcaccgcattacgttgttattcaatgccaacaaagcctatgaccgtcaggtggtagaaggcgtgggtgaatatttgcaggcgtcgcaatccgaatgggatatttttattgaagaagatttccgcacccgtctggagaacattaaagactggctgggcgatggcgtcatcgccgactatgacgaccccgtcattgaacagctgctgaccgatgtcgacgtgccgatcgtgggcgtcggcggctcctaccattcgcccgaacactatccgccagttcactatattgccaccgataaccatgccctggtcgaggccgcgtttctccatttaaaagagaaaggcgtccatcgcttcgcgttttatggtttacccgccaccagcggcaagcgctgggccgttgagcgtgagcacgcgttttgccagctggtcgcgcaggagaagtatcgcggcgtggtctatcaggggctggaaaccgccccggaaaactggcagcacgcgcaaaaccgtctcgctgactggctgcaaacgctgccgccgcaaaccggcattattgccgtgacggacgcccgcgcgcggcacgtgctgcaggtctgcgaacacttacacattccggtgcccgaaaagctgtgcgtgattggcattgataacgaagagcttacccgctatctgtcccgcgtggcgctctcctccgtcgcccagggcacgcgtcagatgggctatcaggcggcgaagctgctgcaccgtctgctggataaagaatctctgccgcttcagcgcctgctggtgcctcctgttcgcgtcgtagaacgtcgctcgaccgattatcgctccttaagcgacccggccgtcattcaggccatgcactatattcgcaaccacgcctgcaaagggattaaggtcgatcaggtgctggattcggtaggcatttcgcgttcgaatctggagaagcgttttaaagaagaggtgggcgaaaccattcatgccgtcatccatgctgaaaagctggagaaagcacgcagcctgctcatctccacgtcgctgtcgatcaacgaaatctcgcagatgtgcggttacccgtcgctgcaatatttctactcggtgtttcgcaaagagtatgacaccacgcccaaagagtaccgggatcgccacagcgaggtgttgatatagaaaagaaaacgccttccagtggaaggcgttttttgagattacatatgagcggcgattaagcgctggttatcctggtacatggcgaagagatagttgttatagctctgtcccttcgtcgaataccctttcagcttgtggatcatcgtactggccgtcacttcctggtccgctttacgcagctgagcgcgtgatttacggaacgatgagtaggccgggtgcgtgttcagattcaccacataagcgttcacggaatccttcacggattcaaactgcgaatagcctttcaccttgccaggcgcattcgtacaacggcctttcacgcatttcatgccgaaaaggttgttgttgttacgcgcaagcttagacgttccccagccgctttcggctgcagccatggtcgcaaccatgctgcccgggatgatatccacacgctcaaggagagcattccacggcacacgacgcgtgttcccgttccagctcagcttgtagcgcttcgtgatatctttcagacgcgcgcgctcggatggcgaccagcggctatcgtactgtttggaaatcagccagttacgatccgcagtaatcgcggcattttgactcgtgatgtaaggcattaccgtccggagaaacgcttttttccttggtgttccggaagggtattttcgcaaatcaggaagtgaactactctttgcactattgcgagaatactcttgtttactgctaaccttactacttgtcgtctttattacgtgggctttcttactcgttgtatccgtgtgcgtcttcgcaagcaccccacccgaaaatgccgtggtgagtaacatgagtatcgcagcccaatatcgtcgaatgggagtcgatatcattaggtctcctggtcggatgtaatcatcccaacaccttattttttcacaaatttgagagcggaatctcaaatcatatcaaaaatagacttcaagagcacgtatagaaatagtccaattccgaaactatgtcacctgaaacttgctcataaaaacatcatttccggaaaaatgtgtgcgttatcgcagataactgcctaattttgcgcaagatcactcatcctcacgcatcctcctggcagaaagcggcaggggatgagtttttcccgcccgcctgctggcaaactggtcaaaaatgccgcgacaggaacctggaatgaaacgcaccgcaatagcctttctgatgttacccgcactggcacatgccgactggtcatcgccggggtttgacgcatttcgcgccgaaggcaccgggattttcaccagccaggcaaagcttgcgaagggtacgcgtcctcttacgctcagttttgacaagacgtgctggcagcccacaggcgcgataaaactcaatgagatgctgtcgctcaagccctgtgacggtacaccgccgcagtggcgccttttccgcgacggtgaataccagatgcgaatcgatacacgctccggcacgcccacgctgctgctggcggttcagagcgcgacagaacagccggtggccaacgttatccgccagtgcccgaagtgggacggtaagccgctgacgctggacgtcagccataccttcccggaaggttccgtcgtgcgcgatttctacagtaaacagacggtgaccgtacaaggtggaaaaatcaccctgcagccagccgccaacagtaacggcctgctgctgcttgagcgcgccgaaaccgacaggccggcgccgtttagctggcaaaacgccaccgtctattttgtactgactgaccgctatgtgaatggtgacccgagcaacgacaacagctacggccgccacaaagacggcatgcaggagattggtacgttccacggcggggatctcaagggactgaccagcaagctcgattacctgcagcagctgggggtgaatgcgctctggataagctccccgcttgagcagatccacggctgggtaggcggcggcaccaaaggtgatttcccgcattatgcctaccacggctactacacccaggactggacaacgctcgacgccaacatgggcaccggggatgacctgcgtcagcttgttgatgaagcgcataagcgcggcattcgcatcctgtttgatatcgtcatgaaccacacgggctacgcgacgcttgcggacatgcaggcgtatcagttcggcgccctgtacctgcagggtgatgagctgaaaaagacgctgggagaccactggacggactggaagcctggcgcaggccagacctggcatagcttcaatgactacatcaacttcagcgacaaagccgcatgggaaaaatggtggggtaaaaagtggatccgcaccgacatcggtgattacgacaaccccggcttcgacgatttaacgatgtcgctggcgttcctgcccgacctgaaaacggaatctaccgctccttccgggttacccaatttctatcaacacaaacccgatacccacgcgaaagctattccgggctataccccgcgcgattacctgacccactggctcagccagtgggtacgtgactacggcatcgacggtttccgcgtggataccgcgaagcacgttgagcttgcggcctggcagcagctgaaagaccaggcaagccaggcgctggccgcctggaaaggcgctcacccggataaaaagctcgacaacgcaccgttctggatgaccggcgaatcctggggtcacggagtgatgcagagcgattattaccgccacggcttcgacgcgatgatcaactttgattatcaggagcaggcggcgaaagcggtaaattgcctggccgatatggatctcacctggcagcagatggcggagaagctgcaaagcttcaatgtgctgagctacctctcatcacacgatacgcgtctgttccgcgaagggggccagcgcgcggcggagctgctcctgctggcaccgggcagcgtgcaaatctattacggggatgagtccgagcgtccgttcgggccgacaggctccgacccgctgcagggcacccgctcggatatgaactggcaggacgtcacgggcaagcaggccttaaccgtcgcccactggcaaacgctgggtcagttccgcgcccgccacccggcgattggtgaaggcaagcaaaccacgctgtcgctgaaagaggggtatggattcgtacgtgaacatgatggcgataaggtgatggtcgtctgggcggggaatcagtagatcatacccctcaccctaaccctctccccatggggagaggggagaagctccagaactattcactacacaaatcaactcccgccctataaaaccacaaatccgaccacaccacccgatttgcaccaacacggtgctagcgttatggttacccactttcaaaataagctcgacagatcacctgctatgacgttttcacttttcggcgacaaatttacccgccattcaggcattactcgcctgatggaggacctcaacgacgggctgcgcacaccgggcgcaatcatgctcggcggcggaaacccggctcaaatcccggagatgaatacctatttccagaccctgctcgctcagatgctggaaagcggcaaagcaaccgatgcgctttgcaattacgacggcccgcaggggaaaaccgagctgctggcactcctcgccgaaatgctgcgtgacgagctgggctgggatatcgaaccacagaatattgcactgacaaacggcagccagagcgcgtttttctacttgtttaacctgttcgcaggacgtcgcgcggacggcaccaccaaaaaagtgctgttcccgctggcgccggagtatatcggctatgccgattccggcctggaagaggatctgttcgtctctgcgcgcccgaacatcgagctgctgccggaaggccagttcaagtatcacgtcgattttgaacacctgcatattggcgaagagacgggcatgatctgcgtatcgcgcccgacgaacccaacgggcaacgtgatcaccgatgacgaactgatgaagctggatgcgctggccaatcagcacggtattccgctggtgatcgataacgcctacggcgtgccgttcccgggcatcatcttcagcgaagcacgtccgctgtggaacccgaacattgtcctgtgcatgagcctctctaagctgggtctgccgggcagccgctgcggcatcatcattgccaatgagaaaatcatcaccgccatcaccaatatgaacggcattatcagcctttctccgggcggcattggcccggcgatgatgtgcgagatgatcaaacgcaaggacctgctgcgtctgtcgaatgacgtgatcaagcctttctactaccagcgcgttcaggagacgatcgcgacacttcgtcgctatttgccggaagaacgctgccttatccacaaaccggaaggggcgattttcctgtggctgtggtttaaggatttacctatctccaccgaactgctttatcagcgactgaaaaagcgcggcgtactgatggtgccgggcgattatttcttcccgggtctggataagccatggccgcatacccatcagtgcatgcgcatgaactacgtccccgacccggaaaaaatcgaagcgggtgttaaaattctcgccgaagagatcgaaaaagcctggcaagaaggcaattgttaaaaaataaggctcttcaaatgaagagccttatttttccgtgatctgaatcttatattaaggatatatcctgtagcgcttcatttatcattcccattgagttttattaggattattcctttaatttaggctcgataaccaccctctcaataattaagcaaaaattaaatatgctaacttattgttattttaaataaccctcttcaacgcagcaaaataccttcctgagtcgctttcatgcatatttaaaaatactgcatatactcactaatacgccgctcggcgttcttttgcgtggagtattcatatgctacctaataatgttagtcgcatcagcgctattgctgttgcggtactgctcgcgttctctctttctgcctgtagtggaagcggtggcggatctcactcaacggccaaaaataaccctgcgacgggaagcagcagcggctcagatgatggaagtggcacaaccgcgagcaatggcggttcgggcagcaacggatcgggcaccggaacgggttcaggtaccgggacaggcgctggcggcggaacgggttctggttcagggtcgggatcaggctcaggctcaggaggcagtggaggaaccactaccgcaggcgtaaatacgatactgggtgatgccggtaaaaccgtgaccagcgtcggatccactgtggatagcctcggaagccagcttccgacaaataatcccgtcacgtcaaccgtctcaaccaccgtcagcggtgttggcagtgccgtgtccaccgtggggacaggcgtcacgactggcgttggcgatccaaacaacccgaacggtgtgggtaccacggttaaaggcgtgaccacgtcggtcacctccctcggcaataccgtttcaacagtaggcacgggcctggcgagttccacttccggaaccccggtcagcggcgtaaccggcctgacgggcagcgtggtcaacagcaccgggcaactggtcagtaacaccggcacgggtctcaccaacacggtaagcagccctgctgtcactcaggtaacaaccgataccacgaccctggctaacaagacgctgggcggagtacaaggcgtgacgcaaaccgtaggcaccacaacgggtctcggcacaccggttaacggtctgctgacccaggtgggtggcaccgtcagcggcgtggggaccaacattagcagcagcaatagcgggcttagcggtgtcggtcaggtcgttcaaaatgtcggccagacggtcacggatagcggtacgctagtgaaacccacatcaaccaccggaggcagcggcacaggatctctgacggccgatgccaatgtgacagccacgaacaatagcctgagcacaacggtcaataccaccctcaatacgctgactgcgggtgtaacggccaatgcaggcacaacccaaaacacatctacgacaaacccgattaacgggctcaacacgttaacctcgagcctactgacgccaaaacagtaatccttttactgcctgtctgcgcccctggttcaggggcgctttattcagcgacatttaccccaaccggggatgacgaacagggatagcgcgatgaaacaccacttccttttttcgctgacggggctggttgtgctgagcatggcccgcgccgatactctgccctctattattaaccccgataacccggcgcaagtttctcgtaacgttgcccccgaacagactgaggccgcgccacagccgaacgtcaaaatagaaaaaccgaagtcaacgctgacgcctgaaacgcccattaccattcatcacattcagtttattggcggcacgcgttatcccttgaaggaattacttcagcccttcaggccttacgctggaaaaaccgtgccgctaaaaacgcttacggggctggtaaacgatattacggaacgctataaggccgacggttttccactctcttatgcctggctgcccgataataatttccagcagggcaatattaaaattgttctggttgaaggctatgtcgctcatagcgacatcaccagtaataacccgcacatcgccgaacgtcttaaacgtttgtccaaaaaaatcatggcggaaaaaccgctgtctcaggatacgttcgatcgctacagccagctgatgacgcgcaccccgaacgttccggttacggctaacgcgcagctgccaaccaatatctatggcgcggcggcgatgcaaatcaccggcaaccaggagcggagctggaatatcgcgtcgacgattgatacccgtaaagggcaagatttaatgatgctgaacggcacgctcagcaacatgacaagctatggcgatcagcttggcgtggccacgcttgtgccgttagatagcaacacgcgaaaaaactatgtcgggctcaactggcagcagtttttaaacgacgaagggctgaccatgcagctcaaaggcagctattaccgtgaagatccgcgagatttttcgcccctgctctctttgccgaataatatcagcgtcgattcgaagcaaaaaacaacgcaatacaacggcggcgtgacgtttggctaccccctgctgctgacgcaaaaatcacaaattaatctgaccagcggttttgattacaccgaccgccaggatgattatgccctgcaggccagactgctgggcaaaacctatagcctggactccgtcaaccagcacgcgcgttatcccgcgctggaagtgggcatcaacggtgcacatcagttcacaaccgccagcatcagcggccgactcaacgtgcgtcagggtatggacgcgatgggagccgatatcgtctcggcccccaggcccgatattaattttacgctcacgaaaagctatctggacgcagcctggctgtttgccgataagtggcggctatcaacgtcctgggagggggactggtcaaacaacacgttgccagagcccgaacgcgttagcttcggtgcccagcggtttggccgtggataccaggacagtgaagcaagcggtgattacggctatggcgggcaggtagaactgcgctatatccagatgcgaaaagagagcacatggcttgccacaatccagccctacatcctggccgataccgcgcaaacctggtttaacacctccggcttgcctcatcagcggctcgggtcagtggcggccggcgtgatggtaggcgatacccgccactatagcatcacggttgaggcggcaagacccgtcggggatgttccgacagacagtcgcaacagagactggcgctacagtctgacgtttacgtggaatttcaataaaatgcagtaagcctttcagcccgaatactggcaggatcaacgcagcgcagcgcgtgggttggacaggcctcaacgcaggccggtccgccttcgcgctgcacacataaatcacatttcagcgcttgtgccctgcttcccaccagccgtacctgcatcgccccaaacggacaggcgaccatgcagcttttacagccaatacagcgcgtctgctcaacaagccaggcgcctgccgtaaggctgatggcatgggttgggcagacattggcacagggggcgtcctcgcactgatggcaacccaccgccgtagtgtaggcgtcccccttcaccacccgcaggcgagaggtaaaagcctctgcggtgaagtcatcctgatgcgcgaccgcacaggccacttcacaggtgcggcacccgatgcatttttccgcatccgccatgataaatcggttcatctgttacgcctcgcgtacgttaaaacccagctcttttgagatagcctctgccgtttcgcgcagcggcttgagcaggttcttctcgcccacctgtttcatgcgcgacgtcgatagcgagatagagatcgcatacggaacgcggccgtgaatatcaaacaccggcacggcaatacaggagacgcccagctcgttctcttctttgtccatcgccatgctgcgatcgcgaatttccgccagttcatcatacatggcgctcagttcagtgatggtgttgcgcgtcaaaggttggatctgttcctgatggctttcccagtagctcgccacgtaatcctgatggccaaacgccatgtaaatcttgcccatcgcagagcagtacagcggcatatgctggccgatataggcgcgcgtgcgcagcataccggttgtcggttcgagcttataaatcaggatggcgtggtcatcttcccggctggagaagttcaccgtctcgccggtcgcaatgttcagcgcttcgaggtgcggagcggccacatgaatgatattcagcgacgacagcgccttttgcccgacggcgataaatttggtggtcaggcgatagctgcccgcggcgggtgccggggtcacgtacccgcacgactgtagcccctgcagcaagcggtgcacggtgctcttattcagccccgccagttccgataaatgtgcaagcggacacccgttcggatagttgctgaggatctcaatcagcatcaggccgcgaaacaagctctggctgcctgctggcctctctttttcttgcgtcatttcgctctctttcatgctcattacatggctcctgtttagcgcgtcctgatggtagcgcaaagtgtgggtcagttcacgatctcaacagaaaaaacacaaccagttgattttaatcgattttgaaaaacatgaatgtcgttgatctgacaaaatttgatcgctatatttgaaatcagatttcgcatagtggaatttatcgataaaaaagcactcacacttgcccttaaaagaacaggagaacagggatgaaagtgaccttcgaagagttgaaagcggcgttcaatcgggttctgctcgaccgcggcgtgaaagcggaaaccgcagacgcctgcgccgagatgtttgcccgcaccacggaatccggcgtctattcgcatggtgtaaaccgtttcccgcgttttattcagcagcttgatgcaggggatatcattcctgacgcccagcccaaacgggtgatgacattaggcgccatcgaacagtgggatgcgcagcgctccattggcaacctgacggcgaagaagatgatggatcgcgccaccgagctggcgtccgatcacggcattggtctggtggcactgcgtaacgcgaaccactggatgcgcggcggcagctacggctggcaggcggcggagaagggctatatcggcatttgctggaccaactcgattgccgtgatgcccgcgtggggatcaaaagagtgctgcatcggcacaaacccgctgatcgttgccattccgtcgaacccgatcaccatggtcgacatgtcgatgtcgatgttctcctacggcatgctggaggtgaaccgcctggccgggcgcgcgttgccggtagatggcggctttgacgacgaaggtctcctcaccagagagccgggcgtgatcgagaaaaaccgccgtattctgcccatgggctactggaaagggtccggcttatccatcgtgctcgatatgatcgccaccctgctctcaaacggatcttccgtcgcggaagtgacccaggacaacagcgacgagtacggcgtatcgcagatcttcatcgccattgaggtggatcgcctgatcgatggcccaacccgcgatgccaaactgcagcgcattatggacttcatcaccaccgccgaacgcgcggatgaaaatgtcgccatccgtctgccagggcatgaatttacccgtttgcttgaagagaaccgccgcaacggcatcacggttgacgacagcgtgtgggcgaaaatccagtctctgtaaggagtgggccatgatattcggacatatttcccagccaaatccgtgtcgcctgccgcgggcgattgaaaaagcccttcattttctgcgcacgacggatttcaccaccctggagccaggcgtagtagaaattgaaggtcgcaacatttttgcccaggttctcgacctgacaacaaaggatctgcacgagaatcgcccggaagtgcatcgccgctatctggatatccaattcctggcctggggtgaagagaaaatcggtatcgcgattgataccggtaataacgaaataagcgaatcattgctggaacagcgcgatattattttttatcacaacagtgaaaatgagtcgtttatcgaaatgatacccggcagctatgccatattttttccgcaggatgtgcaccgtcctgcctgtattaaaaacaaggaaaccacaattcgtaagattgtggtgaaagtggcaatcagcgaattagattaattttctgatataccctaaataattcgagttgcaggaaggcggcaagagagtgaattcccaggagcttacataagtaagtgactggggtgaacgagcgcagccaacgcacatgcaacttgaagtatgacgggtataaatacaggaacgcgaaatgactaataccggttttattattggtgcgtacccctgcgcaccctcgtttcaccagaaaggggaacaagaagaacaaaccttctggcaggaactttccgacacgccgaatattcgcgggctggaacagccttgccttgaaaatcttcacccccttggtgacgaatggctgttccgccataccccgggggactggcaaatcgtggtcacggcagttatggaaaccatgcggtgccgcggcatcaacggcgcgtttggcctggcctcggctgacgacgcgcagcgtaaagcgtgcgtggacttttaccgacatttgcacaaaaaaattaacgccgtgaatacccgcttcccggggaaagtgattgctcttgagatgcaggcggccccgcaggcgggcaatgcctcggtcgaacaagccaccgacgcgttttcccgctctgtccgtgaaataacaagctgggactggggctgcgacctggtgctggaacactgcgatgccatgaccggcgtcgcaccccgtaaaggcttcctgcccttagagcaggtgctggaggtggtgaaagacacggatatcagcgtctgcatcaactgggcgcggtcggccatcgaaggccgtaacaccacccttccgcttgaccacgttcaggccgcgcttaatgccgggaaactgggtgcgctgatgttttcaggcaccacccccggcggggagtacggtgaatggcaggatctgcacgcgcccttttcctcattctgcgccgacagtttgatgtcaactgaacgtgcaaaagcactctttactgcggcgagcgccgcaacgttgaaattctccggtattaaattactggaaataaatgctaatgctgatgtcagccatcgcatcgccattttgcgcgacggtattagcgcaatgaataaagcaacgcaataacaataagaaaagtttattccggttacctactgagagattaactatgaatatttctactcatgctctacatgcggacattccgcgccagcgctggctaagaatcattcctcctattcttatcgcctgtattatttcatatatggaccgcgtgaatatcgcgtttgcaatgccgggagggatggacgaagaattaggtattaccgccaccatggcaggcctcgcgggcggcatattttttatcggctatctgttcctgcaggtacccggcggcaagattgcggtgcacggtagcggcaagaaatttatcggctggtcactggtcgcctgggcggtgatctcggtgctcacgggtctcgtgacgaatcagtaccagctgctggtgctgcgcttcttactcggcgtggcggaaggcgggatgctacccgttgtgctcaccatgatcagcaactggttcccggacgccgaacgcggtcgcgccaacgcaattgtgatcatgttcgtacccatcgccgggataatcaccgccccgctgtcgggctggattattaccgcacttgactggcgctggctgttcatcattgaaggtctgatgtccgtcgttgtgctggtgctgtgggcgttcaccgtgtacgaccgtccgcaggaagcccgctggatctcagcggccgagaaaaactatctggtacaaacgctggcggctgaacagcaggccatcgccggaaaagaggtgaaaaatgcctcgctcagcgcggtgctgtctgacaaaaccatgtggcagctgatcgccctgaatttcttctatcagaccgggatttacggttacaccctctggttgccgaccattctgaaggagctgacgcacaccagcattggtcaggtggggatgctcgccatcctgccctacatcggcgccattgcgggcatgttcctgttctcctcgctttctgaccgcaccggcaagcgcaagctgtttgtctccctgccgttgattggcttcgcgctctgcatgttcctctccgttgccctgaaagcaaacatctggctggcctatgccgcactggtgggctgtggtttcttcctgcaatccgccgcgggggtgttctggacgataccggcaagactgtttagcgccgaaatggcaggtggcgcgcgcggcgtgatcaacgccctgggtaacctcggtggcttctgcggcccgtatgccgttggcgtgctgatcaccctgtacagcaaagatgcaggcgtctactgcctggccgtttcactcgcgctggcgtcgctgctggccctgctgttgccggcgaaatgcgatgccggggcagagcccaatcccacggtaaatccccataagcgtgcggcctgatgccctcaccacagccctctcccacggggagagggagaaaaccgaacagtaggccgggtaagcgaagcgccacccggcaattaagcgagatgaagatgagtgaaaaagagcccttctggctgggtatcgattgtggcggtacttatctaaaagccggtttatacacccgccagggcaaagaagtttgtatcgaacgccgctccgttgccacgctcagcccgcgagcgggctacgccgagcgggatatgcatcagctctggcagcactgccacgccaccatcgccgcgttgctcaagaatgcaggcgtaaacggcaaccagatcaatggggtcggcatttctgcgcagggtaaggggctgtttctgctcgataaacaagaccaaccgttgggcaacgccatcctctcctccgatcgccgggcactggagattgtgcagcgctggcagcaggacggcattccagaaaaactctacccgcatacgcgccagacgctgtggaccgggcatccggcctcgcttctgcgctgggtcaaagagaacgagccgcagcggtatcagcaaattagctgcgtgatgatggcgcacgactatctgcgctggtgtctgaccggcatgaagggcggtgaagagagcaacatctccgagtccaatctctacaacatgaataccgggcagtatgacccgcagcttacgcgctggctcgggatcagcgagattgacggcgccctaccgccgattgtcggttcagcagaaatctgcggggaaatcaccgctcaggcagccgccctgaccggtctcgcggcgggcacgcccgtcgtggggggactgtttgatgtggtttccaccgcgctctgcgccggactgcaggacgagcacacgcttaacgccgtgatggggacctgggccgtcaccagcgggatcgccagtgcgcttcgcagcaacgaacccttcccctacgtttatggccgctacgtgcatccgcagcagtacatcgttcacgaagccagcccgacctcgtccggcaaccttgagtggctcaccgcgcagtggggcgacatgtcgttcagcgagatcaaccacgccgtcgccagcctgccgaaagccgaaagcgatgtgtatttcctgccgttcctctatggcagcaacgccgggctggagatgaccagcggtttctacggaatgcaggcgctacacacacgcgcgcacctgctgcaggcggtttatgagggcgtggtgttctgccacatgacccacctcaaccgcatgctcgagcgctttacccacgtgcatgccctgcgcgtgacgggtggcccaacccattcggacgtatggatgcaaatgctcgcggacgtcagcggactggcgattgaactgccgcaattggaagagaccggctgttccggcgcggcgctggccgccctggtcggcaccggcgtgtatcccgacttccatgcggcgcaatgcgccctccgacacgacattcgtgtcattgagcctgacatgcgcgcccatgaggcctatcagcgcaagtatcagcgctatcagctactgatttcagcactacagggctatcacgcccgagttaaggagaacaacctatgagccgaccattactgcagctggcgctcgaccatacctctcttcaggccgcgcagcgtgatgtcgcgttgcttgccgatcacgttgatatcgtcgaagcgggcaccattttgtgcctgaccgaagggctaaacgccgtgcgcgccctgcgcgagcagtgcccggataaaatcatcgttgcggactggaaagtggccgatgccggagaaaccctggcagagcaggcatttggcgcgggtgcaaactggatgaccatcatctgcgccgccccgctggccaccgttgaacgcggccacgaggaggccctgcgccgcgggggagaaatccagatggagctctttggtcactggacgctggacgatgctcgcgcatggcatcgcatcggcgtgaagcaggccatttatcaccgcggacgtgacgcacaggcgagcggccagcagtggggtgaggaggatctcgcaaaaatgaaagcgctctccgatatcggtttgcagctttctattaccggcggtatcacccccgccgacctgccgctgtttaagcaaatcaacatcaaagccttcattgccgggcgcgcgctggcaggcgccgccaatccgccgcaggtggcacaggcattccattcgcacattcgcgacatctggggagcgtaaccatgcgtcagcatccgttgggtatttacgaaaaagcgctgccaaaaaatctctcctggtccgagcggctggtactggcgaaaagctgcgggttcgattttgtcgagatgtctgtcgatgaaaccgacgagcgattatcacgcctcgactggagcaccacgcagcgcgcctctctggtggaagcgatgctggaaaccggcgtggcgatcccctctatgtgcttgtctgcacaccgtcgcttcccgtttggcagccgcgatgaaaccgtgcgcgaacgcgcccgtgagatcatgagcaaagccatcaggctggcgcgtgatttaggcattcgcaccatccagcttgccgggtatgacgtctattacgaagcgcatgacgaggggacgcaacagcgctttgccgacgggctggcgtgggccgtggatcaggccgccgccgcacaggtgatgctggcggtggagatcatggacaccgcgtttatgaattccatcagcaaatggaaaaagtgggacgacatgctcgcctcaccgtggttcagcgtttatccggacgtcggcaacctgagcgcatggggtaacgacgtcaccgccgagctgacgctgggcattgaccgcattgcggctattcacctgaaagatacccaacccgtcaccgcacaaagcccaggacagttccgcgacgtgccgtttggcgagggctgcgtcgatttcgttggcgtgtttaacacgctccatcaactgaactatcgcggcgcatttctgattgaaatgtggaccgaaaaagcaaaagagccggtgctggagattatccaggcgcgccgctggattgaagcccgtatgcaggaaggaggcatgacatgctagacgaacttaaagccggggtactggcagcaaacctggcgttgcccgcccaccagctggtgacgtttacctggggcaacgtcagcgcagtggaccgcaaaagcggcatgatggtcattaaaccgtccggtgtggaatacgacgtgatgacggcggaggatatggtggtggtgagtatctccacgggccaggttattgaggggaataaaaagccctcttcagacacgcctacccatcttgcgctgtatcgtcgttactcggaaattggcggcatcgtgcatacccattcgcgacacgccactatctggtcccaggcggggctggatttaccggcgtggggtaccacgcatgcggactatttctacggaaccatcccctgcacgcgcctgatgaccacggcagagattgcaggggaatacgaataccagacgggtgaagtgatcatcaaaaccttcgaggagcgcgatcttagcccgatgcagatcccggcggtgctggtccactcccacggcccgttcgcctggggtaaagacgcggccgatgcggttcacaatgccgtggtgctggaagagtgcgcctatatgggcctgttctcacgccagctcgcaccgcagctaccggttatgcagcaggagctgctcgacaagcattatctgcgcaagcacggggcgaatgcctactacgggcagtgatcgggcattgagatgggctttaaggaacagcactgcaggcaagatcgtaggccgggtaaggcaacgccgccacccggctttaccgcatcagaaacgccaggtcaggccggtcatcagcgcgaagctgtcgtcgcggtcgatcatcgggctgttcttcacgtcgtcaggcaacacggtgtagaccgcgctggcgttgagatacagcttctgggttaactgatatttagccaccaggccaacgtatggcgtccagctgtcgccggcggtgtattgatccagtccggagcggcgagactcgctgccggatacgccgtagtagtagtcgttatagctttcgtcgctgtagaacacacctacggaaggcgtcagggtcaggcgctccattttgatcggacggaagtacgatacttcgccgatcacgccgccgctttcatccgtggcatcaccagagaccgccactttcagcgacccccagctttcgtggcggtagtacgccccaccgaggaaggcggatgctttacgctcatccagctgcttcatctgatgatcgtcgttatcgtcagggtcgaaatgcagcggcatccacgttgcggtcaggctcaattcattttttgcatctttccacaggatccatccgcccgtggtctggcgaacgtagaaacgatcgccttcgtagctaatcaacggtactgcggtcgtattttcgttatagcctttgtaaggagactcattaaatacagcccccgcaccaagtgaaaattcaccggccatggcagacgttgatgcaaataacgtggcagcgatcagtaaattgtatttaatagtcattccatgtaatccatatatatgccaaacaagcgaggcgcataataatggttacaaaattgccaatgcaacgctgcggtttatataatattatatataaaatcatatagatgggtgtgcatgatgagtacattacagctaaaaccacgcgaattaaaaattatctccgtcattgcagccacccacagcattggtgatgccgccgccctgctgggtatggcgcaggccaacgtcagtaaatatctgtctgattttgaaacgcgggttgggctcaaggtttttgagcgcaccacgcggcagctggccctgacccagtttggtgaagcgttactcccctacgtgaatgccacgctggataagaacagccagcttgttaatttcattgctgattataagcatgaaaagcgcggaaaagtgacgatctatgccccaacaggtatcgtgacctacctcgcgcgacacgtgatccatcagatagaagacatcggcgacatccgcatctccctgaaaacctacaatctggaccggaatgaattttcagaaggcgttacctttccggatgactgcgacattttaattacctatgcacagccgaaagacgaaagcctggtggccagcgtgttgacacaatattccgttacggccttcgcaaccgtagaatatttaaataaacaccccttaaccggacctgaagatttaattaatcattcctgtattctcattgactccatgctggtcgatgaagccaacatctggcgtttccgcgtgcacggcagcgatgacgtgcatgactaccgggtgaccggtaattatatttgcgacaatacgcagacggccctggagctggccagaaatcatcttgggattgtttttgcaccaaaagagagtctgaaaaaagaattaacgaaaggcatgctggtcccctgcttcccgcatcaggaggagtggtggctggatctgaccgccatcttccgcaaacgcgaataccagccctggcgcgtgcaatacgttctggatggcgtactgaactgcctgcgccagcaaattgctcaggccgcccacggacggcctgagctgggcgactagaacagccccagtggcttatcggaatagctgaccagcagacatttggtctgctgataatgctccagcatcatcttgtgggtttcacgcccgatgcccgactgcttataaccgccaaatgccgcgtgcgccggataggcgtgatagcagttggtccagacgcgcccggcctgaatgccgcggcccattttataggccagattaccgttgcggctccagacgcctgcccccaggccatacggcgtgtcgttggcaatcgccagcgcctcctccatcgttttaaaggtggtcacggccagcaccggtccgaagatttcctcctggaaaacgcgcatggtgttctgcccgaacaggatcgtcggctcaaggtaatacccgtcctgcagatcccctccgagcaccttacggcgtccgccggtgagaatatccgccccctccttcttgccgatgtcgatgtagttgaggatcgtttccagctgtccatgcgagacctgtgcccccatctgagtgacattatcgagcgggttaccgctgcggatagactcgacgcggcgaatggcccgctccataaagcgctcgtagatggattcctgcaccagcgcgcggcttgggcaggtgcagacttcgccctggttaaacgcaaacagcgcaaacccttccagggctttatcaaagaaggcatcctcttcctccatcacgtcctcgaagaagatgttcggggatttcccgcccagctcgagggtcaccggaatgatgttttgcgtggcgtactgcatgatctgctggcccacctccgtcgacccggtaaacgccactttggcaatccgctttgaggtggccagatattcccctatctcaccgcccgcaccgttgaccacgttaatcacgcccggcggcagcagatcgccaacgatttccatcagcagcaggaccgagagcggggtcagacgcgccggtttgagcacaatacagtttccggccgcgagcgcgggcgccattttccagctcgccatcagcagcgggaagttccacggaataatttggcctactacccccagcggttcgtggaagtgatacgccacggtgtcgttgtcaacttcgctgatcccgccctcctgcgcgcgaatacaggaggcaaaatagcggaagtggtcgatagccagcggcacgtcagccgccatcgtttcccggatcggcttgccgttatcccaggtttccgccgtcgccagcagctccagattttgctccatccggtcggcgattttgaacaggatcgccgcccggtcctgcacggaggtgtgagcccatttctctttcgctttgtgggccgcatccagcgccaggtcgatatcacgcttaccggagctggcaatctcgcacagcggctggccggtaaccggggtcaggttggaatagtattctccatcgacgggcgcgacccagtcgccgccaataaagttgtcataacggggcttcagcttgaggggaaaaccatactcgccgggctggatacgcgatgagggagggttgtttgtcatgtccgtctccttgctgttggtgtacaacaagggtagttccggctggcgattttctcgccaaccggtaacggtgtttacgacggaggtcacggagtttcaggaaataataacgaatcgcgcaacagatgatcgttaccgcggcggcgggtaaagccgatgcggttgaaatactccaggatctggatcgccagcttacggcccacgttcagccgatcgcggaaatccgctgcgcaggtcgagccgcgcgcctgatccagctcgcggatcaggttggcaaacgccacaatgcgatcgttacggtagtaacgatctttcacgatcgcgacgattagcccctgctgcgccgcatggcgcaacacctgccgcatcagctgctcttcggtattcgtttcgcgggccagatcccgaacccaccacggctcatcgccaaacagcggggctactttttgccatatcgcctcctgatctgcggtgaacccggccttgtgatccggcaggtgcagccagccgtggtggcttttaatcactccgctttcgcgcatgttttcaatcagcagcagcaccagcgcatcgtcttccatcggcagcgccatgcgtcgcagacgctcgcgccccgggcctggctcgtcctgatgctgttcgtggtaagtcgcaagcgtgttcagtagcttacgctgccattgcgcagcaaccggggcattgagcaggctgtctccggcctgtataaagcccggctcctgggtcagctggcgtaagccttccccgctcagctggcgtgcccatgcaaaatcacgcagactcaccgccccgcgatcgaggtgcacccgcagcgcggcgttatcctctttggcctgcgccagcgcggccagccactgcagatattccggcttacgcttgccgcgtcgaggtgggttaagcgccaccacgcgcgcccccgccagcgtttcccttgcagaaatgtcacgcagtaccagacgatcgttgtctgccagccagagcggcgaatcgaataccagctcggcaaggtcgttttccagcagcgacacgcgcccggtgatatggctggccgcgtggtgaatatgcagcggctgccattgggtcaacggtatgtgtgtctgcagggagacaatcacgcgttcagacggttccggcggagcatcggccagcagccagtctccgcggttcagctgctctttttccgcatccccggcaatgttcagcgcgatacgttgtccggcgtgggcacggtcagcgggctggttttgtgcgtgcagtccgcgcacgcgcatcggtttattcacgcccgtcagccagagggtatctcccacgctgacttcaccgctcagcgcggtgccggttacgaccagccccgcaccttttacggtaaaggcccggtcgatcgccagacgaaagcggtgatggctggcgtgagcgcgtgatgaaaggtgctgcaaatggtggcgaagttcgtcgataccacgcccttctgtcgccacggtgacaaaaagcgatgcgtcggcaaagccatactcccgcagtgtcgcctggaccgtttcgcgcacctcgctgacgcgcgcgtcatccacgcgatcggctttggtcagcgccacggtcagctgcgggttgccggtcaactgcaggatcgccaggtgctcgcgggtttgcgccatcacgccgtcatcgcaggccaccaccagcagggcatgatcgatgccgcccacgcccgccagcatattagacagaaacttttcatgccccggcacatcaataaagcccagcacgcggccatcaggctggggccagtaggcatagcccagatcgatggtcatgccgcgctttttctcttccggcaggcgatcggcgtttacgccggtaatcgcctgcagtaacgtggtttttccgtggtcaacgtgaccggcggtggcaataatcatttcaacaacatctccagaaatcgctcttcatcttcaaggcagcgcagatccagccacattcggccgtcgtaaatccgcccgagaaccggcgtcggcaggccacgccagcgtgacgacagggcttcaagatggctaccgcgcccgtcacgcggcgtgaacgtcagcgcctcactcggcagcctgtccaccggcagcgaaccgctgccaatctgcgactggcagggctcaatgcgaacgtcaaaatcggggtagtgcggggcgacgcgcggcagcagtaactcggcctgggcgcgaatcgaggcggcatcccggcttaacaggcgcagcgtgggcaggcgctcagccagtttttccggatggagatagagccgcagcgtcgcctccagcgcggcaagcgtcattttatcggcgcgcagggcgcgcttgagcggatgctgctgcagctgcgcaatcaactcgcgcttgccgacgataatcccggcctgcggcccgcccagcagtttgtcgccggaaaagctgaccaggctaacgcccgccgcaatcatctcttgcggcatcggctcttttggcagcccgtacaggctcagatccaccagcgagccgctgccgagatcggcaatcaccggtatattcaattcgcgcccaatcgccgccagctccgcctcttcaaccgttttggtgaagccttcaatatggtaattgctggtgtgaaccttcatcagcagggcggtattttcattcaccgccgcgcgatagtctttcgcatgggtacggttagtggtacccacctcatgcagcgtacagcccgcctggcgcatcacgtcaggaatacgaaacgccccgccaatctccaccagctcgccgcgggacaccaccacctctttgccgctggcggtggccgccagcatcagcagcaccgctgcggcgttattattcacaatgcaggcatcttccgcgccggtcagctggcacagcagctccgccagcgcgcggtcgcggtgcccgcgtccggcgccgtccagatcgtactccagcgttacgggcgcttgcatggcctgcacgaccgcggcaacggcctcttccgcctgctgcgcgcgccccagattggtatgcagcacggttccggtcaggtttatcaccgggcgtaatgcgctttgcgccttctcatccagccgctgttcaacttcctgctcccacgcgctacaccaggcgggcaaggcgttttctgcctgaatcgcgcatcgggcttcgtcctgaagcaggcgtaacatttccaccgtcgcggtatggccgaaacgctcagcaacagcatgaatgcggggttcgcgaagaagacggtcggtagcggggatctggctgtacagcgaatgatgagtagtcatgaaggcgcctggcgagtaaatatcttcccccctcccgacgggagagggagttaacatgtggggggattgtaccgcctccgacggcgaagtgttataacccgcgtcaagcctttggtggttcggtacgggcaaagctctcgcggctaaacagcgtgtctgcaagcttcaccagcagcagacggtcgacgcaccagcccggggagacgtggcggaagttgagataaccaatcgcgcaggcgatggcgatggtccccaggttcaggctgtcggtgtcgatctttccctcccggataagctgttcacacctgtccaggctgcggctgattttttcccgctggcgtaacagttccgtttccgactgctgggcagcgggccttgcctgttcccgtacggaggttaatgccgcatccataataccgtcggccagggcttcgacctgcttcaccgccagcgccgcttttgggtcagcaggcagcatagccggggcaacgcccagcagctcaatgtactcggcaattattggggaatcgaaccagtactcgccctcgtccgtaaccagcgccgggacttttcccagcgggttgtactgcgcaacgccgttttccgcgttgtaaggctgttcattcacgaattcaaattcaatccccttctccagcaggagaatcgagatttttcgcacgaagggactggtgtagctgccgatgagtttcattgcctgatccttaatgccggaaaaaagtcagtatggatcaagcgatgaaaaaagggcaggtctgcatgtcgcattcctgccctggaaggattagtgatcgaggtagaggtagtgcatccagctggtcatacgcagcagtactttacgcatgaccgagacgtgggcgaagtggtccgaatagaccgccacctgggcatagataccgtccggcagggcatcgacttcagcgtcagggctcagctcgatgatggcctgcacgccatccgtgcccggcgtgaccgtcagagactggagcgcaccctgcgcctgataggttccccccggcaccaccggcagaattgcggtgagcttcccggagaatacctggcccggcagggcgttaaacaccacttccgcttcatcacccggtttcagacgcagcagcgagttctggcggaactgggccacaatctgacgcttctgttcaggaatgaagaccatcaccggacgcagaggcagcgcggcggcataggtccccggacggatcagcacctgggtgatgtaaccatcgctcggcgcacgcactacggtctggtccaggttatatttggcttcggcaagctgggcacgtaacgaagcaatctgcgactgctcgccgttcaccatgctgtctaactggctttgaatctgcacctgctcagccacggagcctttcaccatggcatcctgtgccagatagttttgccgcgcgttgtcgatatcgctttcagagaaaggattcaccttcgcctggctgcctttcaggtagcgctgataatctctatagaggcgatcgcgctcagcggagacgcgtgtggtattggcaaccgcttccgacagctgcgctttcaggttatcgatattgtgcgtcgcggttaccaggtcggcctggagtctgtcgacgcgcgcctggtagcggccaggatccagtttaaataacacttcgccttttttaataagctggttatttttatccgtgacttcactgaccacaccggtcacctgcggcgtgattggaatagaaataaccgctttttgcgccgtaaaggtatacggatggttatagttcattaacagaataagaccggcaacaataaatacgccgcctaatgttgcggtggcaagcgtccactggttgaccggaatacggaatattttaaaaatggcccaggcaaatgccacgtaggtcaaaataatcaacagatccatgattagcgctccagcgtgttctcacggggcacaaaatgccctcgaccataaaacgcgcttatgttgtgatcggggttcaataaatcactaaacaaggtatactccggagttgtttattgtactaaacgctcctgtgagaggatgctactgcgcacctatgactcaattcgcttctccagttctgcatacgttgctggataccgacgcgtataaactgcacatgcagcaagccgttttccaccattactatgacgttcatgtcgcggcggaattccgctgccgtggcgacgacttgctcggtatctacgcagacgccattcgtgaacaggtcaatgctatgcagcatctgacgctgcaggacgaggaatatcagtggctttctggcctgcctttcttcaaagccgactacctgaactggctgcgcgacttccgctataagccggagcaggtcaccgtggttaacgataacggcaagctggatattcgccttgcaggtccgtggcgggaagtgatcatgtgggaagtgccgcttctggcggtaatcagtgaactggctcaccgctaccgttccccggaaacgggcgtagcgcaggcggtggcctcgctggaaaagaaactcgctgacttctccacgctgaccgcagggctggacatgtcccgcttccgcctgatggactttggcacccgccgccgtttttcgcgcgacgtacaggaggccatcgttaaacgtctgcagcaggagccgtggttcgtgggcaccagtaactacgatctggcccgtcgcctcaatctgacgcccatgggtacccaggcgcacgagtggttccaggcgcatcagcagatcagccctgacctcgccaacagccagcgcgcagcgctggccgcatggcttgcggagtacccgaatcaactcggaattgccctcacggactgtattacgatggatgccttcctgcgcgactttggacctgaatttgcggagcgttatcaggggttgcgccacgattccggagatccggttgagtggggtgagaaggcgattgcccattacgagaaactgggcattgacccgatgagcaaggtgctggtcttctccgataatctcgatctggcgaaagccgtcgaactctatcgccatttcaacgccagagtgaacctgagcttcgggatcggtacccggttaacctgcgacattcctcaggtaaaacctctgaatatcgtgataaagctggtggaatgtaacggcaaaccggtggcgaaactctccgacagcccgggcaaaaccatctgccatgacaaggcgtttgtccgcgcgttgcgcaaagccttcgatcttccccagatcaaaaaagccagttaagcgcttaagggagccttcatggctcccctcttcttatttatttctcaattcttcccttttgaccgcgaaatttacttgtctgatagcggatggcaggtaacatagatatccccccataagggtggacaagtgtttattttttccgactattaacagagagaatattatgagcgttgtgcctgtagccgacgtactccagggccgtgtcgccgttgaccaggaagtcaccgtgcgcggatgggtgcgtacccgccgagattctaaagctggcatctccttccttgccgtctatgacggttcctgctttgatcctgtacaggccgtcattaataattctctgcccaattacaatgatgacgttctgcacctgacgacgggctgttccgttattgtcaccggcgtggtcgtggcatccccgggccagggtcagagtttcgaaattcaggcttctgcgattgaagtcaccggctgggttgaagatccggatacctatccgatggcggctaaacgtcacagcattgagtatctgcgtgaagtggcgcaccttcgtccacgtaccaacctgattggtgcggttgctcgcgtacgtcatacgctggcgcaagcgctgcatcgtttcttcgatgagcagggttatttctgggtgtctaccccgctgatcaccgcgtccgatacggaaggcgccggtgagatgttccgcgtctcaacgctggatctcgaaaacctgccgcgcaccccggaaggtaaagtggactatgacaaagacttctttggtaaagaggccttcctgaccgtatccggccagctcaacggcgaaacgtacgcctgcgcgctgtctaaaatctacacctttggccctaccttccgtgccgaaaactccaacaccagccgtcacctggcggaattctggatgctggagcctgaagtggcgttcgccaacctggatgatgttgcaggtctggcggaagcgatgctgaaatatgtcttcaaagcggtgctggaagagcgtccggacgacatgaaattcttcgccgagcgcgtagacagcgacgcggtagcccgtctggagcgcttcgtctctgccgattttgcgcaggtggactacaccgacgcggtggcgatcctcgagaaatgcggtgagaagttcgagaacccggtttactggggcgtagacctggcgtctgagcacgagcgctatctggccgagaagcatttcaaagcgccggttgttgttaaaaactacccgaaagacattaaggccttctatatgcgccttaacgaagacggtaaaaccgtggcagcgatggacgtcctggcgccgggcatcggtgaaatcatcggtggctctcagcgtgaagagcgtctggacgtgctggacgcgcgtatggaagagatgggtcttaaccctgcggactacagctggtaccgcgatctgcgtcgttacggtaccgtaccgcacgccggttttggtctgggctttgagcgtctgattgcctacgtgaccggtgtgcagaacgttcgtgacgtgattccgttcccacgtacgccacgtaacgccagcttctaatcggtaaaagactaaaatggccagcctgtgctggccactattttatcctgtattgtcagttttcgtcagcgtaaagtcagcatcttcaaaccttcaccccgtcacaaccactacctgttacgttttgtttccgcgaaatatccagccacaaaaaataaaccccattcttattgcgcttattacatcctcaagcaatagcacaaatttcaaccaattttacagccatccagaaggcttttcggcgtcataagaaaaaacgagtcgtttatcgtctgtttatatgaattgcctttatccaaattaatcataaggaattcatatatataggatagatactgtcgcttaattcaccaaggcgttctgaagtttgaggtggttcacaaagttcccaaaaatacacgtttagttacatatattttcttttggttactcaatcttgagatttgtagcactttcaggctagcgaaacgcttcggcgaatggaaagatgcctgtcagatacataaagacaccaaactctcatcaatagttccggaaatatttattgacagaatttattgacggcagtggcgagtgtcataaaaaaaccaatgagggtaataaataatgatgaagcgcaatattctggcagtggtaatccctgccctgctggtagccggtgcagccaacgctgcagaaatctataacaaagactctaataaactggatctttacgggaaagcggttggtctgcattacttctctgactatgctggcaacgatggcgaccagacttacgctcgtctgggcttcaaaggcgaaacgaaaatcaacgaccagctgaccggttatggccagtgggaatacaacttccagggtaacaactccgaaggcgccgatgctcagagcggtaataaaacccgtctggcgttcgcaggtctgaaattcggtgatgcaggctccttcgactacggtcgtaactatggcctggtgtacgatgcaatcggcatcaccgatatgctgccagaatggggtggcgacactggcaagagcgataacttcttctccagccgtaatggtggtctggcgacttaccgtaacagcggcttcttcggcctggttgacggtctgaactttggcgttcagtacctgggcaaaaatgaccgtgatgatgcagtacgttctaacggtgacggttgggcaacctcagttagctatgatttcgaaggctttggcgttgtgggtgcatacggcgcagctgaccgtaccaacagccagcaaaaactggactggggtaaaggcgataaagctgagcagtgggcaactggcctgaagtatgacgcaaacaacatctacctggcagcactgtacggcgaaatgcacaacgccgcgcgtttgagcagcaaaggtttcgctaacaaatctcaggacttctctgttgtcgctcagtatcagttcgacttcggtctgcgtccatccatcgcttactacaaatctaaagcgaaagatgttgaaggcattggtgatgaagatttcatcaactacatcgaagttggcgcgacttactacttcaacaaaaacatgtccacctatgttgactaccagatcaaccagctgaaagatgacaacaaactgggcatcaacaacgacgacactgtagcactgggtctcgtctaccagttctaatcagtacaccactttgttatatgcttaatgaacagggcttcggccctgtttttttatgcctgacagaaaataatggcgacttttgaaaagccgcacgcttttcgtcgcaaacggttggcattttgtaaatctaccgttaacctgatagcggatttcacttctgtaatcacaatggaacttcgtcatgtttgagaacattaccgccgctcctgccgacccgattctgggcctggccgatctgtttcgtgccgacgaccgccctggcaaaatcaacctgggtattggtgtatataaagatgaaaccggcaaaactccggtactgaccagcgttaagaaagctgagcagtatctgctggaaaacgaaaccaccaaaaactacctcggtattgatggtatccctgaatttggtcgctgcacccaggagctgctgttcggtaaaggcagtgcaattgtgagtgacaaacgtgcccgtacggcacagaccccgggcggtaccggcgcgctgcgcgtggcggcggatttccttgcgaaaaacacctctgtgaagcgtgtctgggtaagcaatccaagctggccgaaccacaagagcgtatttaactctgcgggtctggaagtgcgtgaatacgcctactacgacgcagcaaaccactctctggactttgacggcctgctggctagcctgagtgaggcgcaagcaggtgacgtggtgctgttccacggctgctgccacaacccaaccggtatcgatccaacgcttgagcagtgggaacatctggcgaagctgtccgtagaaaaaggctggctgccgctgtttgactttgcctaccagggcttcgcccgtggtctggaagaagatgccgaaggcctgcgcgcgttcgccgcagtgcatcaggagctgatcgttgcaagctcctactccaagaactttggtctgtacaatgagcgtgtaggtgcctgtacgctggttgcggctaacgatgagaccgtcgatcgcgcgttcagccagatgaaatccgttatccgcgctaactactctaacccgccggcacacggtgcctctgttgttgcgactatcctgagcaacgatgcgctgcgcgccatctgggaacaagagctgaacgatatgcgtcagcgtattcagcgcatgcgcctgctgtttgtgaacaccctggcggagaaaggcgcggatcgcgacttcagctttatcatcaaacagaacggcatgttctcgttcagcggccttaccaaagagcaggttctgcgtctgcgtgaagagttcggcgtgtacgctgtggcatctggccgcgtgaacgttgcaggcatgacgcctgacaacatggcgccgctgtgcgaagcgattgtcgccgtactgtaatttgcgcccacaaaaaagcctgcattatgcaggctttttttattcgggttaccagacaggcatttcatcctgaaggaacggattatggagccgttcatagcccagcgtcgacatcggaccgtgcccagggataaacgtcacatcatcacccagcggcaataacttctgtttaatcgactgaatcagctgtccgtgatcgccgcgcggaaaatcgctgcgtcctacgctacctttgaaaatcacatcgccggagatcagcagacgggactggtcatcaaagaagacgatatggcctggcgtatgcccaggacaatgcaacacctgtaaaatcacattccctatgctaacgcgctctccttcgttcagccagcgatcgggcgtcaggggctgacactcatccaggccaaacatgcggctttgggcgggtaacccctgcagccagaactcatcttctttttccggaccgacaatcggcacgccgtagtgttcagccagttcagccgctgcgcccacatggtcgaggtgaccatgcgtcagtaaaatctgcataagcgtcacgccgctgtcggcgacttcctgcttgatcttctcagcgtcaccgccgggatcgacaagcgcggccagtttagtctgttcgcaccagatgagtgagcaattctgggagaacgcggtaaccggaataatacgatagttcatactgctcctgtgtttcgttattaccagtgccgaaccggaccggtatcaatatgcacaaagttgctgctggggtaatatcctacaccacctgcgcgcatagataacgcagctttgcgaatattggctaacgaaacgccctcaatatggaaatccattgcctgtcccttcgtgtgatagctttttttcgctaccccgcgactgtgggcgcgcagttcattattggtatcaacagagcgataaccagaaataagctgcaccggcttgctggtacccagcaggccctgaaggcggtaaagctgatcaaacagtcctggatcgatggcttttattttattcgcgcggaaatcacggaaaaaatggttaagtcttgctaattcatcctgaatatagcctctgccatcgaagaactccgcttttagcgactcaccggtatgaagattgttgagcgttaaaactcgcggacgaggtgtcgagagggtggcaaatgctggcgtcggcaagatggccgctgcgccaagcgcaacaccacctaacgccagcagtttgcggcgattagcgtcaaatttgtccatgataatcaggtctacaggtaaaagaaatcgtaatatgcatagcgcacgaagggcaccttaactggcaaaaccgggtacgtcaaggcgcccaaccccagtgaatacgcggcttgcagcgatatagccccttattcaccctaacttacgacaatcaattttcccgaactgcttcatttacctgattaattgttccgcttttggcaaaatttgtgcgccggatcgcgcggtgagatcataattgtaaatatctgtacggtactgagtccgcccgtcttcgcccacaaacgccgtcagatagtaaagattgaccggaatattgtgccgaatattaacgtaacgcgtatccccttgtttcagggcatccgaaatgcgcgtatcgttccagcccgcatcctgcagcagcatattggccagctccgaggctttgttcacacgcacgcagccagaactcagcgcgcgcgtatctttctggaacaggttgtggttcggcgtatcgtgcagatagatagcgtcagaactcggcatattgaatttgtaacgccctaaagagttatgcgcccccggtgcctgctggaaacggaacggcaggtttgacgccgtgattgtcgaccagtcgaccatataaggatcgatagcctctttactgttccatccacgcatcaccgtatagccatgacgttccagataacccggatcgttccagaccttcggcagaatgtctttacgcgccagcgtcggcggcacgttccacggcgggttaacgactacgttattgagcgcgctgctcatcatcggtgttttgcggtccggacgcccgacaatcacgcgcgacgccagtttttcgctaccgtcctggtaatagaccagggaatacgccggaatgttaaccataatgccggtagaaagggttcccggcagcaggcgcaaacgctggatattgagcgccagcacccctgcccgctgcgcaggcgatacgttcagccagtctcgcgtcgtctggccaatgacgccatcggctcccagtccctgagcggcctggaattgcttcactgccgcaaccagctcgcgatcgtatgctgcgggtttattgctgacggcaatcgcttttttctctttcacaggcgctgacgggctgaccgccgcgttttgcggatcgtcgcctggcagggcgatatgtggcccgccttcaagaagacccgagcgcgtcaggatctcgcgcagagcaggcacatcgctgctccactgccccggacgcagcgtcgcggtgccgcgcatctgcggccatgggcgcgagtcacccaccagcgtgaggagcgactggtgaagcgtggggtattgtggatgcgccggtgcgaggctggcaataaagcgcggcagttcgccattatcgagggctaactgccactggttaatcaccgacagcgctggcgtcgcgagcttatacggcttatcgctgtacagccagcggttgccattgaccggaatacccgccacgaactgcaggtaacccatcatggcatcggaaagcacgacgtcccgtgcctgaccggacacggcaggatcggttaacagctcaacccactttgtaaactgcggctgaaaccctgcaattgcgacctccgccagctgctgctggaaggcgcgcacggcatcgcggttttcccacatcggtttcatatcgcgggcggcataaagcagcgtgagctgattgagatagacaggcgtgtagcctgacggcagccccgactgcagctgctggctgagcgattcggcgtcgatgccttccggcagcggcttaataccggccattatcgccgtcgccggagattgctccagcggctgggacaacgacgtaggctgcgcgcccgtcgttgccgagctgtcagtcggcacaatttcaggctcatcggcctgggcggttaacagtggagcaaacatcactgccagacataaacttagcgccgacagctgacgaccacattttttcttaagcaacatcccttgccccctgttttcacgacatgcccatcacgttggggctttctttcattataggtagacggctaagctgttgccttaccttatgtaaagaagtttaaagataacgcagccctaagcacaagttaagtttaaaaaaaagcggcgccagagcgccgcttcgggtcagaagacacttcaggaagcgtccgccgtggtttccggcagtgactccggcggctgcggcgcaaagccgcgcagcccgacaacgtgaacgtgctcgctgttctggaacactttacgcaccagcttgtaggttgtccctttttcagggctaatgttctccggtgcggcaatgatgagctgcatatcgagacgttcgcaaagctcaaacagcgtggcaatggagcgcgcatcaagacgcgccgcctcatccaggaacagcagtcggcatggggagatgtctttgccgcgcaggcggcgcgcttcgtcttcccagctctgtaccaccatcaccagaatcgacatcccggtaccgatcgcttcaccggtagagagcgccccggattccgcgcgcagccagccgtcggagccacggtttacctctacctccatttccaggtagttacggtaatccagcagctcttccccgatggtttgcggcgtacgctgtcccatatcaatctgcgggttcaggcgctgatacagcttcgccagcgcttcggagaaggtcagacggttgctgttgaacagatcctggtgctgctcgtgctgctcagacagcacttccaacagcgtcgcgtgggcttcacgcacgttgacgttgaggcgcacgctgttcacctggccaaacgacacgctctgcagaccctggttcagctggcgaatgcggttctgctcgcgctgaatggttttgcggatgatattcgccacgctgcgggagctgatcgccagcttctgctcgcgagaagtcagctcttccgtcaggcgccccagctcgatttccatctgctcaatggcttcgaccggatcgtcggtacggataatgtcctgacgaatacgctcgcgcaggtgctggtaaaccgccacaaagaactggattttacgttcagggcgtttcggatcctccgacatacgcagcacgtcgcgcaggtgttcgttatccgccaccgccagacgcagcgcacccagcgccttatccgacatggaacgcagctcatcggcagagagatacgccagctcgcgacggtgcagacgacgctcaacgttattgtctttcaccatgcgcattaccgcgcaccagcctgccttggcggtcacgacctgctcgcgcatttcatggtagtcgcgctccagcttgcgcaggcgacgggtcaggttatccatctccgcttcacagaaggtcagcgctttttccagctgattgcgacgcgcgcggttattgctgagctgagcatgcagctcgtcacgacgaatgcgcgcgcgctcttccgccccgctgtcggcacggacgccgatatcctgaagctctttctgcaggtcgtttaacagctctttcttggtgtcgaaggagcttttcagcgaggccagcacctggttgtactggttcaactgagcggagtggctgcgcattgcttcgcgggcgcgggtacgctccgcttccgcctgctcaaggcgcttacgcagcttttcattcagatcgctgttaccgctcagcatttccgccgaatcggagtagccgaaatgggcgcgacgctgcaccacttccgtcagggcaaacgcctgctgacgcgcttcgcgctgcacctgctgtgaccaggcataatcttcttttaactgctcgaactgttccgggtcgctctgcaggacagagacaaccggctccagcttcgccagttgattgccatgctgctgcacgaagcgcgcggcttcctgcgcttcatccagacgctcctggatctcatccacgcggtcggccagcgtgtcgtctgccagcagattcaggcgcggcagaatacggttaagggccgcgacgccctctttcgcctgctcgaactggacgcgactctgctggttgtcgctttcatgactggcaatcgcccgttccagttcgccacggcgggtattgagtttgcgaatttccgcttccgggtcggcttcgaaggccacggccagatggctgccgataaagcggctaaacgcctgatgcaggcgctgggttttctgcacgtcaaacgacagcgtcgcaaagcgttcagacagcgtttcgcgctcggcgtgcaggctctcgatgcggctttcgcgcgcggcgcggccaaacagcggcagttccgggaagcgggaatagcgccactgacggtcggcgattttgactaccaccgctttttccagctcatcgacgctaaatacgctgtcatcgaacgactgcggatccccttcgatcaggtagagatcttccggacaatcttccagaccggcaagctgctcagaaatcagcgacagatccggcaccacgatcgcgttacgcgacgggccatacagtgccgagaagtatggcgcatcgtccaggccgacgtcgtcgtaaatctcagacagcagtacgccgccaaaacgctctgccagggcattgaggcgcgggtcttccgcaccgcccggctggcttaagcgctcaatttcttcgtcgacgtcacgcttgcgcgcgcccacttcatcacgctcaacaatcgcctcgcgctcgcgctccagcagctgctgcaggtattcagtgacttcctggctggattcgaactgctcgccgcactgctcactgagctggttaaggctgctctgggccgccagccaaaccggggcacgctgcagaagcgcttgcgaacgggactgaagctgttccagctcctgacgcagggtcatacgctgttcgctagcgctggaaaccgtgtctgaaagcgcagcgatacgcgcctcgagttcctgatgcagggcctcaagctcgtcaaaatcgtaatgtttgccctgacgcttgcagaattcggccagcagacgctcggcctcctgctgctcgcgcaggcgctgttccagctcgttcagacgcatacgcagcggctgaacctgctcggccagatggcgctggttcacgccgtcacgcagcagctcgcgggcaacgtcccaggcttcgttacgcgccagcgggccgttaatcgccacaaccagctgataggcctgctcaaactggctgtgcgccgtttgggcgacgctcattttctgttcgagggagagcagtttctcagtggcttcctgctctttagcctggaaggtatccagccattcgtcggcgctttccggcgtcaggtcaggcagatggcacagctctttcgcgcgctgtaaggcctgcagtgcctgggtgtactggatcgcacgcgtctgctgcacgtccagcgcctgctggtaatcagcaagctggcttttcagctcatccacttccagctcggccgcttcggcgcgggcttcgttctcttcctgcatctcggcggcttcggccaccacttcattttgctcttcaagacgaatgtgcagctcgtcgaggtccgcttcatagcgctcgattttctcctgctgacgcagcgcggtctgcaccaggttcaggtgatcgctggcggcctggtaatcggcttccaggtcaccttcagcaccgttgtgctcaccgagctcgcgcgccatttcgacgtgcttgtactgctcggccaccagctgtttgcgggaggtaaacagctcgcggcggtattctaatgcctgatcgaggtggacgcggcgctcgttggcgtggcgcatgtagtccgccgccacgtagttagtggcttcgctgatcaggtgtttaaacagatcgcggtcagactgggtcacgcgaatcgcttccagcgtcatgcggttttcacgcagcgccgcctccatgtcctggaaggccttacgcaccccgctgttttccggcagcaggtagtcgcgcagggagcgggtaatggcgctggagataccgccgtacagggaagcttcgatcaggcggtagtatttgctacggtctgatgccgtgcgcagacgacgcgccaccacgccgagatcgaacatcagcgagtggtagtctgtaatcgagttgaactgtttgaactgcacgccttctatcgcttcgagcttatctttcagctcctgcagcgtcagcacgcgcgcctggcgctcgttcagggtttccgtcagcagcgccgtcggctgtacagacgttggcagtccctggatggcgaacggtttaatgtcgactttacggtcgcgaccggcaacctgctgcaggcgcacacccaccaccacgcgctgatggcgggagttaatgacgtccagaaccgaataacagacgcccgctttcaacttaccgtgcagacctttatcacgggaaccgcttgtggcccccgcttcggtggtgttacggaagtgaagcagcgtcaggtcagggatcagcgccgtgacaaaggccgccatggtggtggatttacccgccccgttaccgccggagagcgtcgtgaccagctcatccagatcgaacgttcgggcaaagaagccgttccagttgatcagcgtcagtgagcgaaatttaccgcgttcaatcattactcttcctccccgctatccggcagattctcttcatgctcatcattgagctgcaaatggttttccaccggcatcgcttcaccgtcgcggatcatgcgaagctgcgcttcacgcgcgtcatcgcccgcacgcacgtcggcgccgaagcggaagacagattccgtaatgcggaatttgctgctgtcgtgacccataaaccagaccatccccagacgacgcagacggttcagggaagagcggactttttcctgtaatttctgacgatcgagatccgaccccgtggagcggttgttcaccagcttaagcagcttgccctcatctgccagcgtcaacagctcgtcgtaaagttcctgctgggtgaagatcccttcattcgccagacgttccgggctgaggtagaggtagcagagaattttgccgaccatcatgtccagctcggagagcacggaacgcggaatcagcgtcgtggagcgcgggcgcaggtagaaaaacccttccggcgcacggataagctccacgttgtagcgggcgtaaaactcttccaggtactcctggaaatccatcaaaaaggcgtgattatccagctcgtctaagccaatgtgacgaccggcacgcagctggctgtccagcgccggaaataacggattcgccagcgcctgtgccagcttaaccggcatcacttgttcaatatttgtcaatgacatgcgcctgtaccttggctccgtaatcgttaattggctgccacttcggcggcagtccggtgaaatcggcttgcgcgatacccaggcgaacagcctggtctaccacaatgcgggcaacgtcgaagtggcgcgcgcgaggatattgcgccagatagtcgcgcaccacgagccccagatccagcggagcttgtctggttttgtagacagcaagctgttcttcgatcatcgccgcaagctgctcgcgaatttcgttaaattcttcgtattccagatccggcggcagttcaccggttacctcttcatcacgcaatgccatctcttcgtcgcgcatatccagcagacgatcggcattggcgtaggtcagcgcccacggcgcatcgaaataggtctgcaccgactggcgcagacgctgggcaaagacgcggtttttatccatatcgatcgcggtacggataaatttatgcacgtgtcggtcgtagccgatccacaggtcgatcgactgctggccccagctgatgatgcggtccagtttactctgcaggtcgaacaccagacggtcgataaagtgcagatcgtcgtgtgccagcgtcgcgtcctggatgcgcagcaggttcgcctgcagcttatcccctgcggcttccagcgtatcctgcagctcacgcagcgtaccggaggtttctgacagcagaagttcacagctggagatggctgcacgccagtctttattcagcagctgtgcgatatcgtctttgacctgctgctgctgttcgtccatcaggcgctgggtcagatcgatactgtcgaagatttccgccaccgagtatttcagcggtgcatagacgtttcggtgccagtggaattcgtcaccgtcttcatctgccgcatcggcggcgcgcttaagctcaccggccacgatcgacagctgcatggacagacgcagcgtggaaaattcgcgctggcgaatgtagtaatcggtgatgccgatgcccagtggcgtcaggcgatagatggcgtttccttccgcctgctcgctggtaaagcggttcagcagacgttgacgcaccatatcgttaattgcgttgttggcacgcacgctaatggtttcgctggtttgctcaaacgcatcactgacatggcggaacgcgtccaccagttcaccctcgctcatttccccatccagccgctcgccgttcagcgtggcaaccgccagcaggaaagagagtctgtctaccggcagcgagatggagaaatcgtttttcctggcccaggcaaccagttcggggactgtctgggaaaattcactcataggttatccttgcatctgcggcttgtgcgcggtgacgtgaatatagcggccaaggctgacaaaaggctcctggcggcaataccgcgtttccaattctgttaaggtgtcaaaacagtcacgctgtttgtgtttttcacgcagataatcatgaaacaccctgacgcccgtcttcccgacaatctgccagccaatcgcttccagccagccatagacctgctgtggatcgcgcggatagtccggggaaagcgtgcgttttttctttttgggcatcccgacctgaacatagtcgaagtttcccgcaaccatgttgtgcatcaggaagccgttagcattgtagaacatcaacgacagcgtgccgcccgggcgcaacatcgaccacagggtttgtaacacgcttagcggatcggcaacccactccagcaccgcatgaaacaatatcagatcaacctgggtttccaaatgctgtgcgatgtcctgagcggcgcattgtataaaatgcatgttgtcgctcacacctttctcttctgccgcacgcgtcgcgcgggcgaccatttcagcagaaagatcgcaaagcgtgacgtgatgaccgcgttccgccatttttatggccgtctgcccttcaccgcctccggcatccagcacgcgcaacgtttgaccaccaaaggtagccagaatggtgtccagatcctgccagaggatcgtctgacggagctgccctttcgtggtgccataaatgttgcgcgaaaacttttccgcgatgtcatcaaaattgcgatcccgcattgggagagttccactcgctaactgcaaaaccgctattttgtcacacccgcgcggagaatgaacctctctggtgtaatatcaccgtcaatcacctgctatatggtcaaaaaaggaaccaaaaaggatgctttttacccttaagaaatacattggagggatgatgcttccccttccgctgctgctcatcatcatcgcgctggggctggcgctggtgtggttcagtcgctttcagaagagtggcaaaacgctgatcacgttcggctggttggtcctgctgctgctgagcctgcagccggtggctgatggtctgttacgccccatcgaaaacaggtacccgacatggcagggaaatcagaaagtggcgtacatcgtggtgctgggcggcggatatacctgggatcctgactgggcccccagctcaaacctgatcaacaacagcctgccgcggctaaacgaaggcattcgcctctggctggcgaatccgggatcaaaaatgatcttcaccggcgcggcggccaaaacgaacccggtgagtacggcggaagcgggcgcccgggtcgcggaatcactcggcgtaccgcgctcctccattatcactctggacagcccgaaagataccgaggaagaggccgccgcagtcaagcaggcgattggtgaagccccgttcttactggtgacctccgcctcgcacctgccacgcgcgatgattttctttgaaaaacagggcctgcacccgcttcccgcaccggcgaaccagatggccatcgacgcgccgcttaatccgtgggagcgggtaatcccgtcccctatgtggctgatgcatagcgatcgcgtcggttatgagacgctcggacgcctctggcagtggctgaaaggttcctcaggcgagccagggcaagagtgatttagtcgccagatcgaagtttgcgcgattaaagcgtccggtgttaaccagctgcgcaacttcgtcccagagcaggtagagccagcgccgccagagaaacgcttccgcaacgggggcgcgttgaaggtaatgccacagtaaaccttccgccgccccgctgtcgctgagcctgaacagctcatattcgcgcggagcccagagcatgatccccggccccaccatcgccagaagctgatcgctgcgggggtctttcagcatactgcgcagggtgaagttaccgtggatcagcacgcagttatcgttaaaaccttcgaacagtgccggtaaacactcccgggtgcgaaagagaatacgtttgtcctgcatggttaaaccggtattgttgaactggttaagcgttccccacagcacttcaacccgctggcgataccacagcggccagagattttcctgagtgctgtcgaccggcccgacaagtccgcggctatcctgacggtgccacgccagcagcgcctcgacaatctggtcttttagctgttcccagcgttccggcgttcgcgcgggcgcttcaacgggtacaccacgtaaacgttcaatcagcagtacgtccgggccggggtgttcctcatgggtcatcacgccgtacaccgttggcatacgcacggttccctcccgcgccagcatcgacattttccatgcaagctgcctggcaacgccgggtgacgtgaaactccgtgccatcagcggcattgggttaccctcactgtcgtacaacgaccagagcgcggtatcgattttttcactcacgcattcgacccggcttaacttttcacccagcagatggctaagttcggcacgcagctgttccatatgagattacccccattaagactactgcttttataatgagcgtccttaatgaagatgtcacccggaagagatcaatcaggaaaaagaaagtgaaaaataaaccggagagtgcatctctcccaacggagagatgccggtaagattaacgcaattcagcgcgaacgcgctcaagatcttcaggggtgtctacgcccgtgccggggacttcctcagcaacggcaacgtgaattttctcgccgtaccagagcacgcggagctgctccagcatttcgatatgctccagcggactcggggcccaggccacataacggcgaataaagccggcgcgatagccgtagatcccaatatgacgcaggaaggtatcaccgatggtctctttagaaagcgcaaagcgatcgcgatcccacgggatcgtggcacgggagaaatagagcgcatagccttccgcatccatgacgaccttcaccgcattcgggttgaaagcttcttctgcatgatgaatgggtaccgccagcgtggccattccgacctgacgctgcgccaggttttcggccacctgacggataatgacagcggggatcatcggctcgtcaccctgcacgtttacgataaccgtatcatcactgaaaccgcatttctcaaccacttctgccagacgctcggtgccggactggtgatcggcgcgggtcatgcatacctcaccgcctgccgcctcaacagcacgagcgacatccggatgatcggtggcaacaatcacgcggtcagcaccggattcacgcgtacgctcaaggacatgcacaatcatcggcttgccgttgatatccaccagcggcttacccggcagacgcgttgaggcataacgcgcaggaataatgacaacaaaactcatggtttgctctcttctgccaccagggaacgggcttcgttttccagcaatacaggaataccgtcgcgcagcgggaaagccaggctgtccagcttgcaaatgagctcttgtttgtcctggctgtagtagagtttgccgttgcataccgggcaggcaataatttcaagtaaacggtgatccatagttcctccgtatgggtaatcgctaaagcttaacacattcctttttcagggcgtgcctgtttcccagccacttcgacaggatgtaaacaatccgtcaggtacccggcccagcgtcacgtcgtccgccccctgccagcgcgcgaattcgctaatggcggacgttaaccctttttccaggctcgccgtcaccctgacgccctcttgcaaataaagcgcaatgatttcaagcgtgccggtcttgcggtgcattttggcatccatgcgcccgaccagctgccccttatgcaggagcggtaaaacaaagtagccatactggcgctttggggccggggtataacattccagccggtagctgaaatcaaagagctgctcggcgcgttttctgtcccagacgaccgggtcgaaaggcgacaataccgcgctgtgggtcgcctgcagtttcccctccagggcctgaggcaatagcgggaggagatccgcatgtagccacatttcgcccagcgtttccacggtaacgggaatgacgcgctgttcgcgttgccacatgtccagcagcggtttcagcgcgggctggcgcaggcgataataatctgccagccattgcgagcgaaaaatccccagactacgggcgctgttttctaacataatggcctcagccgcctcttgggtaagcaggtcgcgctcgtcgtcccagtggggcatcacgcgatgcgtgaggtcgtagacacgctgaaaattacgccgctcaatcaccatgactttgcctgaggtaaacaggccttcgagatgacgcttgtgcggcttccactcccaccagccgcttgtacctttgcgcgggtgttcaaaatcggcggagcgtacaggaccgttttcctgaatatgcgcgatgagctgctctatttcagccgcatgttcctgcatccacgcctgtcggtatttccagcccatcttttccggcgcaagcatacggtgacgcacaagggcaaaatcgctgcgtggaaggaagcaggcttcgtgcgcccagtactccatcaactcccccttgctgagcgcctcatccagccactgggaaggatagctccccaggcggctgaacagcaccaggtaagggctacgtgccacaatattaatggtgtcgatctggagtagcgacatgcgctgtacggtagagagaatatcggcaggctgcgcgcggcggcggggctttttgagcagcccctgcgcggcaaggtggagattacgtgcggctgagagcgagagttgcggtaaagacatgcgttttcctgtcagtcaaagcgccaccagaaccgcgtaagcctttagtgcaccaacgcaatcagttccttgagcaaatgttccggctgctcaccgctgagttcggcgtcaaccggcagacaccaccagttatctttcgcaaaggcgcggcatttcaccgcatctttttcggtcatgatcagcgactgcccgggtacggtcagggcagcgacctgcccttccaccagcgcctggtggtcggccagcggaacgcgttttttcagccgggcaccacactgttccagcgtcgcgaagaagcgcggcggatgaccaatgcccgccatcgctaccagtgaaggcaactctgaaaccgaccggcgttcacccgtcaccaggttgattgccagacccggctgcaggtgcatcgggatttcacccgttttcgcctcaccaccgttcacgatcaccgcatcaacggacttcagacgcgaagcgcgttcgcgcatgggtccggcaggtaaccaccagccgttcccaaaacggcgaaccccgtcgatgaccacaatctctttatctcgcgccagggcataatgctgcagaccatcgtcagtgataatgatctgtaccgcatgttcggcaagcagggcccggacggcatcgctgcgcaccggggagaccgcaacaggggcgccagtacgctggaaaatcaataccggttcatcacccgcttcagccgtcgtggtttccgccgtcagcaacagcgggtaatgcgccgctttaccaccatatccccgcgataccacgcccgggcgtataccgcgcttttgcaactgctccaccagccagatcaccaccggcgttttgccgttgccgcccgccgtaagattaccgacgaccacaacgggcaccggcgcgcgccaggcccgcttcaccccaagacgataaagcagacggataatgccgctcaccaggccgtagagccaggagagcggcaaaagcagcagccacagcggggattcaccggaccagatgcgtgcaatcattcgccgaactgcatcttatgaagctgagcgtaaacgccgcggtgttccagcagatcagcatggcttcctcgttcaacaatgaccccatcctcaaccacgacgatttcatcagcctgctcgatagtcgacagacggtgcgcaatcaccagcgaggtgcggttcttttgcagctcatccagcgccgactgaatcgcgcgttcagattccgtatccagcgcagaggtcgcttcgtccaggatcagtatcgggctgtcgcgcagcagcgctcgggcaatggcgatacgctgacgctgcccaccggagagcagtacaccgttctcgccgatgatggtatccagaccgttatccatcttgttgataaagtccatcgcgtaggccatacgtgcggcgttctcaatctgctcgcggctgtactcttcagtgcgtgcataagcaatattgtttgccacggtatcgttgaacaggtgcacgttctgggagaccagcgccacctggttacggagcgactgcagggtatactcccgcagatcgtgaccgtctaacagaatttcaccttcgtcaatgtcgtagaaacgggtgatcaggctggcaatggtcgatttacccgagccggaacggcctaccagcgcaacggttttccccgccggaatggtcaggttgatattgcgcagagccggtgtttcgcggccaggataggtaaaggtcacattgcggaactcaacgtcaccgttcgcgcgctcaatgacgcgtttgccttcatctttttcctgctcggaatccagaatgctgaacagggtctgacaggccgccatcccacgctggaactgggcgttgacgtttgtcagtgatttcagcggacgcatcagggcgatcattgaggagaagaccacggtgatggtacccgccgtcagcgtctccatgacgctcgggaagcttgccgcatacagaacgaacgccagcgccagtgaggcaatcagctgaataatcgggtcggagatagaagaggccgagaccattttcatcccctgcagacgcattttgttgctcactttatcaaagcgtttggtttcaacgtcctgaccaccaaaaatcagcacttctttatgccctttcagcatctgctctgcgctggtagtcacctgccccatcgtattctgcatattcttgctgatattacggaagcgttttgagacgacgcggatagcaatagaaaccacaggtgccagaacgataaggatgagcgacagctgccagctgtagtagaacatcatcacgaacaggccgataatcgacgcgccctcgcgcacaaccgtaatcagcgcgctggaagaggaagaggcaacctgctcggagtcgtaggtgatccgcgacagcagcgtcccggttgactgcttgtcaaagaacgcaaccggcatgcccatcatgtgactgaacagtcgacggcgcatggtcatcaccactttcccggatacccaggaaatgcagtagctggagatatagctggtgataccgcgtaagatcatcagtccgataaccaccagaggcatccatagcagcactgagcgatccgttttaccaaaaccgtcgtccagtaacggtttgagaagcgatagcataaaggtatcgctggctgcgttgaggattaacgctacacccgccacgatcaagcctgctttaaaaggggcaatcatcggccagagtcggcggaacgtttgccacgtggagagatctttgtcgttatgcattcaaaaaaccagcattgttgaaatagccgcatattctacccgttatcgacgggcgcgccaaaccactgatgataccaacgtggtaaaatttgctctcgcaagcgccggatttgccagtgatgttgcgagaatgtcaccgatatttgtcctgaatgaggggtatcgtgccagatatatccctcttttcgataacgtcgaacgacttttgccgacgggaagtgccatgcgttataacgggccgcagaatccagggcgatctgtccttccacccgctgtaccagcggcaatgaagacgaggtattgctgccatgatgggggacctgtatgagcgtggccctcagatgacgccagtaatggctaagcatagcctgttccgcctgcacttcaatgtcccctgttagcagaacgctttgctccccgtcgtccacctttaccacacaggaatggttattcccctgggccgggtaattttcaggaggccagtggacggtgaaggttaatccctgccattcccatttctgcccacgaaaacaagggcggtgtcccgtcctgcgtaacgggcttcttacccatatatccggccatgctttttgcaacgacgcgaggcctcctgcatggtcgaggtgttcatgactgagaatcactccttctggccgtaggtgatgccagcgaagccagggaataattaaccgctgcgcgctgtctccgtccggccaggcgagcccggtatcataaagaatggcttttcccagcctttcaatgaccatggccagcccctgccccacgtccagcatatgcagcgtccagctctcgcttttttccgctcgccagaggggaaatgtcagcaggacactgcctgcaagacaaacggcaggaacggttttccaggcacgaaaacgccaggcaataatactcaaccacggcagtaatgccatgatttgccagcgttgatcgacattctgccagccatctggcaggcgcatcagtagccagaagagtcccgcaagcgacttatcggcggcaaaccagatggcactttctaccgcagccagcggtagcaaatggagcagcataccgagcaggatcagcgggacggagacaaacgttaccaggggaacggcaaagagattcgcgaccagggaggagaagctgaagccatggaaaatcagaacctgtaacggcatgagcagcagcaacatcccgacctgcagataaatcaggttcagtagcggccgcatccgtcgtgtccaattccagtcgggaagaggcagccactgaaaccagaaaatcagcgcggcgacggcaaaggctgacagaaccagactctgcgaaagtacggccaggggatcgttaatcagtatcgccgcgatgcagcagctccaaacctgccagggagaccactgacggccagtaatccgcaacatagcaagcaccgcaagggcgatgatcgtcctcagcgcaggcggttgcagaccggtaagccaggcgtagaaagcagcaaagaacaacccggcaaggagaggcatttgccagtggacgcggtggctgggtaataaaaactggaatccacgtgcaagtaaccagacgagagaggctgccagcgcgatatgcagacccgaaatcgccatcagatgcagcgtgccggtttcccgcatcaggtcttttatttcacggggtacttccaggcgttctcccatcccaagccccaggataaccgctccccatcggtaagctgaaagtcggttttgcagcgacatcagatattgcgctcgctggctgcagcgcccgtcgacgatctccgcacgggtgaagcgcccgctcagcgtttgatgtcgggcaaaagcgctgcgctgagcatcataaccgccgtcgttgagttcgccgtgtgcaggcctgagcctgagcgtcatgctccagcgctgccctgcacacgccttttgcggcagataattgccatacagcgttacgccggtagaggcccaccagcgcttgccattgacgcttagaatgcttccctgatgctgagtggcgccatcagtcgcggtgagctctatctcagcctgcacggcccccgttgttaaatgctgcatcggccagatgctctcctgcgcggccaaaatgccccaggcacaaaataacagcgtcatacccgcatacttcagtcgactgttttgccatgcagcaagcgctagcccgccagccatcattacccaaacggtgttgggggaaggcagttcaggtaaccagagtaacggaactatcgccagaatggcgcagatgctaagcgcgggaattcccattgctacctccctgtttcagggtggcagtatgcaagcaggctgagcggtcgtcaggtgtgaagaatacgatttacggcaagcgcagcaaggtatttaacgggttgcagaaaacgaaacggaaaatgcggggcaccttcagaaagaaagcgacagcgacaaaaaaagcacccgcaggtgctttctttcgaacccagtttaaccggctggctaaactcagttgccgtaaatattggcgcgatcgcgcagttctttacccggcttaaagtgtggaacgtacttaccttccagttcgactttatcgccagttttcgggttacgcccggtacgtggagcacgatagtgcagagaaaaactaccgaaaccgcggatttcaatgcgctcgccctgggcaagagtggaggccatatgctccagcatctcttttacggcatcttccactgccttggcagggatatgcggttgctgactggcaagtctttcaatcaattctgacttggtcatgattcctccggttcctttcaaaccaattagctgaacagctcattaaacaagggcggccgtagccgccctttgttattgattacaggacgaatcctgtaatctgtcaagtttgctcctcatccttcgcgctgtaaatgcgttacagcgcaaatgatgctgagaacctgatattactcgcctttagctgctttgaaagcttcagccattgcgttgttagagaagtttgcatcttcctgtttgttaacagttgcgattgcatctttctcatcagcttcgtctttagcacgaacagacaggctgattgcacggttcttacggtcaacaccggtgaacttagcttcaacgtcgtcgcctacgttcagaaccagagtggcatcttcaacgcggtcacgggaagcttcagaagcgcgcaggtaaccttcaacgccgtcagccagttctacggttgcgcctttcgcgtcaactgcagtgactttaccgtttacgattgcgcctttcttgttcagtgcaacccagttgttgaacggatcttctgcgagctgtttaacgcccagggagatacgctcacgctctgcgtcaacctgcagaacaactgcagcgatttcgtcgccttttttgtattcacgaactgcttcttcgcctgcaacgttccaggagatgtcagacaggtgaaccaggccatcgatgccgccgtccaggccgatgaagataccgaagtcagtgatagacttgattttaccttcaacacggtcgcccttgttgtgggtttccgcgaactgctgccatgggttgtttttgcactgcttcaggcccagggagatacgacgacgttcttcgtcgatatccagaaccatcacttccactacatcaccaacgttaacaactttggatgggtggatgtttttgttggtccagtccatttcggaaacgtgcaccagaccttcaacgccttcttcgatttcaacgaagcagccgtagtcagtcaggttggttacgcgaccagtcagtttagtcccttctgggtaacgcttagcgatagctacccatggatcttcgcccagctgtttcaggccgagggatacacgagtacgctcgcggtcgaacttcagcactttaacagtgatttcgtcgcccacgttcacgatttcgcttgggtgcttaacgcgtttccacgccatgtcggtgatgtgcagcaggccatcaacgccgcccaggtcaacgaatgcgccgtagtcagtaaggttcttaacgatacctttgacttccatgccttcctgcaggttttccagcagctgatcgcgttctgcgctgttttcggattcgataacggcacgacgggaaacaacaacgttgttacgcttctggtccagcttgattactttgaactcaagctctttgccttccaggtgcagggtgtcacgaactggacgaacgtctaccagagaacctggcaggaacgcacgaataccattcagctcaacagtgaagccacctttaactttgccgttgataacaccgaccacagtttcagcttcttcgtaagctttttccagcgtgatccatgcttcgtgacgtttcgctttctcacgagaaagcagggtttcaccgaagccgtcttctactgcgtccagagcaacgtcaacttcgtcgccaacctggatttccagctcgccctgggcgtttttgaactgctctgccggaatggcggactcagatttcagaccggcgtcaaccagtactacgtctttgtcgatagcaacaacaacaccgcgaacgatggaacccgggcgagtttcgatttcttttaaggattcttcaaacagttgagcaaaagattcagtcatgtttaatcttcaggttaatattaacgtccacctggctccatgccggatggggttgtttcacatacccgccgtcaatccattgcagcgggggtactgctaaatcggtcgcgattacgcgagtgccagtttttggcgcgcatattgtagcgctttttcaatcacttgctcaatagttaaactggttgaatccagaactaatgcatcttctgctggaacaagtggggcgacggcgcggttacgatcgcggtcatcgcgctcttttatctcggataaaaggcgatcaaagttaacactaaaccccttttcctgcaactgaagcatgcggcgttgagcgcgttcttccgaagaggcgtcaaggaaaattttcacaggtgcatcagggaataccacggttcccatatcgcgtccgtccgcgatcaaacccggtgcttcacggaacgcgcgctgacgacgtaacagcgcctcacgaacgcgcgggaaggccgctacctgagaggccgcattcgccacttcctgagtacggatttccccgctcacgtcttccccttcaaggatgacttccaggttgccattagtcgatacgaaacgcacatcaagatgcgcagccagcggaaccagcgcttcttctgacgccacgtccacatgatgatgcagcgcagccagggccagcacgcgatagattgctcccgaatctaaaagatgccattgcaatgcttccgccatcgctttgcacagagtccctttccctgcgccactcggcccgtcaatggtgattaccggggcaattgccgtcatctttttctccttaaataaggcataccgtttacatgaacgccgcgcattatacgcgtcaacgtgcgcaactgttacctttgcgtgcaaattacggattgattgaagcagagtgtagaagaaatgaacggaagtgttcgtcaggaagcgtaaggaaatgccgcatcaggtgatgcggcaagcgtcatcaggccagcgtgctaatgcgtgccagctgttcaaagtagtccgggaacgttttcgccgtacatttcggatcgagaatggtcacaggcgtgtcggacagtgccaccagcgagaagcacatcgccatacggtgatcgttgtaggtgccgatctcggcaacctgcagttttgcaggaggcgtgacgcgaatgtagtcttcgccctcttccacctcagcaccgaccttacgcagttcggtcgccatcgcaaacagacggtcagtctcttttacgcgccagttgtagatgttacgcagcgtggtggtgccttttgcaaacagcgccgccgtggcaatggtcatcgccgcatccggaatatggttcatgtccatgtcgatggccttcagctcgccgtgagtacaggagatgaagtcatcaccccaggtcacaaccgcgcccattttttccagcacgtccgcaaaacgaatgtcaccctgcacgctgttgcgaccaataccggtcaccttcacggtaccgcctttgatcgcgcctgccgccaggaagtaagatgccgacgaggcgtcgccttcaacaagatagctgcccggagactgatactgctgcgccccacgcacgacaaaacgctgataagactggttttccacctcaacgccgaaggttttcatcaggtgcagcgtgatatcgatatacggtttggagaccagctcgcctttaatcgtgataaccgtatcctgcggagccagcggtgcggtcatcagcagcgcggtcaggaactggctggagacgctgccgtccacctcgacgtgaccgccggtaaagcccccgcgcagacgcagtggcggataattttcctgctccagatactcgacctgcgcgccgccctgacgcagggcatccaccagatggccaatcggacgctctttcatgcgcggctcgccggtcagcacaatgttgttgcgcccaagacacagggccgccgccagcggacgcatcgcggtacccgcgttgcccagaaacagctcaagctcttcacccgtctgcagcgcgccgccgttgccggtcacttcgcagcgggtacgatcgtcggagagagtgtaatgaacgcccaacgctttcagcgcattgagcatatggcgcacgtcatcgctgtccagcaggtttgtaaggacggtggtgccgtttgccagtgctgccagcagcagagcgcggttcgagacactttttgaaccaggcagattaatggtgccatctacccgcgcgataggttgtaacgtcagggattccatgaaaacttaactctcaactcaacataataaaaaccccgcagcagggctacgggggtgaaaacagcgcaattaaccgtggcgacgttcgaagtcgatcatgaaatcggtcagcgctttaacgccttccagcggcatcgcgttatagatggaggcacgcatgccgcccacgacacggtgacctttcagcgcgtgcaggccggccgcgaaggactcttccaggaacactttatccaggttgctgtccgccagctggaacggcacgttcatgcgggaacggttagctttcgccacgtcgttgcggtagaaatcgctcttgtcgatcacgccatacagcagttcggctttctgttgattcactttgtccatctgcgccacgccgccgttttgcttcagccatttgaagaccaggccggagaggtaccaggcaaacgtcggtggggtgttgaacatagaatcgttgtcgttcagcacggtgtaatcaagaatggacgggcacgatgtatgcgctttacccagcaggtcttcacgcacgataacaatcgtcaggcctgcaggaccgatatttttctgcgcgcccgcgtagatcacgccataacggctgacgtcaattggcgcagaaagaatggtggaggagaagtcagcggcaaccacgacgtctttaccgaagttcggcgtctcgtcgatggcaatcccgtcaatggtttcgttcgggcagtagtgcagatacgctgcgttatcagaaagctgccattcgctcattggcttcacggcgcgcaggccgtcaacggtcactttggcgtcaatcacattcggcgtgcagtatttgtgcgcttctttcaccgcactggccgcccagtagcctgcgtcaacgtagtctgccgtcgttttatcgcccaggatgtttagcggtacgcctgcaaactggccgcgcccgccgccgtgacagaacaatactttgtagttcgagggaatattcagcagatcgcgaaaatccttttctgcctcttccgccacctgaataaactctttaccccggtggctgatttccatcaccgacgttcccagaccgttccagtcacaaagttcctgttgagcctgtttaagcacgtctgccggtaacattgccggacctgaactgaaattaaagacttgagccatttcccctcaccacgctaaaagccataagttataactgtggatatcggttttatcattcagtgacacgcgccgcaatgtctaaaacttatgacccgtgaaatgtgccccgcgtcacacaaaacaatctgccgcctcgccaggacaaaaccgacaaaatggctgtcaggtgatgcgtttagcccggctaaccttcgtccattccggatttgcacagcgggggcataattgacgatcccccggctgcatcgcgacgacatggctacatctcacgcaggcatactcgcctgactcaggtacggttctgaaacgctcgatcagcatatccggcaggatgcacagtcccggcctcacctcatcgtcagaatagtaatagacgctaatttgcccgttagtttccatgatcgccagacgcacctgcccgagctgttccacgctgttgaggcgtagctccataaagaactcaaactcggtcatattggcgctctgaacgttttcccaggccagctgaccgtcctcgacgataacgaccggcttcccttcaagcagatcttccagcttttcacttttcgacatcagccacatgacaagccggtaaagcagcgccagggagacaaaaacgatgaagaccggcaccatcggcacatcatcatagaaggcgacgtcccccgccgcggaacccagcgtcaggataatcaacacttcaaatagcgacatctgccttacgccacggcggcccgtgattttgagaaacaggaagacgaggacgaaggtatacaggctgcgaagcgcgacttcgcctaaaaactctggagggactttatcaaacgccatccgctggagatcaaacgctttcatttttctatgccttaacagtaggttactgagtgtaagcatagctcaggcatttattttcgccgaagatagcacccgtcacgcaaaacccgtatcattgcgcgctttacgtacgataaaagtgaacgccatgactcaaacgtttatccccggcaaagacgccgctctggaagattccatcgctcgcttccagcagaaactgaccgacctgggttttaacatcgaagaagcctcctggctcaatccggtgcctcatgtctggtccgttcatattcgcgataaagactgtgccctgtgctttaccaacggtaaaggcgcgacgaaaaaagcggcactggcctccgcgctgggtgagtattttgagcgtctgtccaccaactatttcttcgctgacttctggctgggcgaaaccatcgccaacggcccgttcgttcactatccgaacgaaaaatggttcccactgacggaagacgacgaactgccggaaggtattctcgacgcgcgtcttcgtgctttctacgacccggaaaacgaactgaccgccagcatgctgatcgatctgcagtccggaaacgacgatcgcggtatttgcgccctgccctttacccgtcagtctgacgagcagaccgtctatatcccgatgaacatcgtcggcaacctgtatgtgtctaacggcatgtccgccggtaacacccgcaatgaagcgcgcgtgcaggggctgtctgaagtcttcgagcgtcatatcaaaaaccgcattattgccgaatccatcagcctgcctgaaattccggcagaggtgctggcacgctacccgggcgtggtggaatccatcgccaagctggaagcagaaggtttcccaatctttgcgtatgacggctcgctgggcggtaaatatccggttatctgcgtcgtgctgtttaacccgaccaacggcacctgcttcgcctccttcggcgcgcacccggacttcggcgtggcgttggagcgtaccgttaccgagctgcttcagggccgtagcctgaaagatctcgacgtgtttacgccgccaacgtttgacgatgaagaagtggccgagcataccaacctcgaaacccacttcatcgattccagcggcttaatttcctgggatatgttcaagcaggacgcggactatccgttcgtggactggagctttgccggtaccacggaagaagagttcgcgacgctgatggcgatctttaacgcggaagaccaggaagtgtacattgccgattacgagcacctgggcgtttacgcgtgccgcatcatcgtgcctggcatgtctgatatctatccggcggaagatctgtggctggcgaacaacagcatgggcgcgcatctgcgtgaaacgctgctggctctgccgggcagcgaatgggagaaagaggattatctgaacctgatcgcccagctggacgaagaaggccatgatgatttcacccgcgtacgcgaactcctgggcctggcgaccggtaaagacaacggctggtacaccctgcgcatcggtgagttgaaagcgatgctggccctggcgggcggcgatctggatcaggccctggcctggaccgagtggaccatggagttcaaccagtcggtcttctctgccgagcgcaccaactattaccgctgcctgcaaaccctgctgctgcttgcacaggaagaggatcgcgaaccgctgcaatacctgaatgctttcgtgcgaatgtacggcgctgaggccgttgaagcagccagcgcagccctgagcggcgaagcgccgttctatggcctgcaggccgttgatagcgatctgaaagccttcccggcgcatcagtcgctgctgaaggcctacgaaaagctgcagaaagcaaaagccgcttactggtcaaaataagcgcacataacattaccagcagtaggcgtattcaatcgtctgggctatattacggggcaatttcattgcccctttttttatttccttcggcaatgattgttgattgtaataataaagttaaacacgggtaaatataataatattgatctgggctttactgttactttttatggttaatactccatattaattaactgataaagaggtggccgaacgaaaaaattcaactcttttcataacttttaaaatttatttttatacggataatcaaatacttactccgcatttgctgtaaatccatacacattgcgggcctataagccaggcgagatatgatctatatcaatttctcttctataatgctttgttagtatctcgtcgccgacttaataaagagagagttagtgtgaaagctgacaacccttttgatcttttactccctgctgcgatggccaaagttgccgaagaagcaggtgtctataaagcaacgaaacacccgatgaagacgttctatctggcgatcacggctggtgtgttcatctctatcgctttcgtcttctacatcaccgccactaccggtactgccggaatgcctttcggcatggccaaactgattggcggcatttgtttctcactgggtctgattctttgcgttatttgcggcgccgacctcttcacctcaacggtgctgattgtcgtggcaaaggcgagcggaagaattacctggggtcagctggcacgtaactggcttaatgtttacgtgggtaacctggttggctgtctgctctttgttttgttgatgtggctttctggcgagtacatgaccgccaacggtggctggggccttaacgtcctgcaaactgccgaccacaaaatgcaccacacatttatcgaagccgttgctctcggcatcctcgcgaacctgatggtctgcctggctgtatggatgagctactcgggtcgtagcctgatggacaaagccttaattatggttctgccggttgcgatgttcgttgccagcggctttgagcacagtatcgcgaatatgttcatgatcccaatgggcattgttatccgcgactttgcgagcccggagttctggaccgcagttggttcatccccggaaagtttctctcacctgactattatgaatttcattactgataacctgatccctgtcactatcgggaacattatcggtgggggtctgttagttgggttgacatactgggtcatttacctgcgtggcgacgatcatcattgatggttttctcaggcagtaaataaaaaatccacttaagaaggtaggtgttacatgtccgagcttaatgaaaagttagccacagcctgggaaggttttgcgaaaggtgactggcagaatgaagtaaacgtacgtgacttcattcagaaaaactataccccgtatgaaggtgacgaatccttcctggctggcgcaactgacgcgaccaccaagctgtgggacagcgtaatggaaggcgttaaactggaaaaccgcactcacgcgccagttgattttgacacctccgttgcttccaccatcacttctcacgatgctggctatatcaacaaagcccttgagaaaatcgttggtctgcagactgaagcaccactgaaacgcgcaatcatcccgttcggtggtattaaaatggttgaaggttcctgcaaagcgtataaccgcgagctggacccaatgctgaaaaaaatcttcaccgaataccgcaaaacccacaaccagggcgtattcgatgtttacaccaaagacattctgaactgccgtaaatctggcgttctgactggtctgccagatgcatatggccgtggccgtatcatcggtgactaccgtcgcgttgcgctgtacggtatcgacttcctgatgaaagacaagtacgcgcagtttgtttccctgcagtccgatctggaaaacggcgtaaacctggaagcgactatccgtctgcgtgaagaaatcgctgaacagcaccgcgcgctgggtcagatcaaagagatggctgctaaatacggctgcgatatctctggtcctgctaccaacgctcaggaagctatccagtggacctacttcggctacctggccgcagttaaatctcagaacggcgcagcaatgtccttcggtcgtgtatccaccttcctggatgcctatatcgaacgtgacctgaaagcaggcaaaatcaccgagcaagacgctcaggaaatgattgaccacctggtcatgaaactgcgtatggttcgcttcctgcgtacccctgaatacgatgagctgttctccggtgacccaatctgggcaactgaatccatcggcggtatgggcgttgacggccgtactctggtgaccaaaaacagcttccgcttcctgaacaccctgtacaccatgggtccttctccggagccgaacatcaccgttctgtggtctgaaaaactgcctctgaacttcaagaaattcgccgctaaagtgtccatcgacacctcttctctgcagtacgagaacgatgacctgatgcgtccggacttcaacaacgacgattacgctatcgcttgctgcgtaagcccaatggttgttggtaagcaaatgcagttcttcggtgcgcgtgcaaacctggcgaaaaccatgctgtacgcaatcaacggcggcgttgatgaaaaactgaaaatgcaggttggtcctaagtctgagccgatcaaaggcgatgtgctgaactatgacgaagtcatggagcgcatggatcacttcatggactggctggcgaaacagtacgtcactgcgctgaacgttatccactacatgcacgacaagtacagctacgaagcctctctgatggcgctgcacgaccgtgacgttatccgcaccatggcgtgtggtatcgcaggtctgtccgttgctgctgactccctgtctgcaatcaaatatgcgaaagttaaaccaattcgtgacgaagacggtctggctatcgacttcgaaatcgaaggcgaatatccgcagtttggtaacaacgattctcgcgttgatgacatggcggttgacctggtagaacgtttcatgaagaaaattcagaaactgactacctaccgtaacgctatcccgactcagtctgttctgaccatcacctctaacgttgtgtatggtaagaaaaccggtaacaccccagacggtcgtcgtgctggcgcgccattcggcccaggtgcaaacccaatgcacggtcgtgaccagaaaggtgcggttgcctctctgacttctgtcgctaaactgccgtttgcttacgcgaaagatggtatctcttacaccttctctatcgtgccaaatgcgctgggtaaagacgacgaagtgcgtaaaactaacctcgcgggtctgatggatggttacttccaccacgaagcgtccatcgaaggtggtcagcacctgaacgtgaacgtcatgaaccgtgaaatgctgctcgacgcgatggaacatcctgagaaatatcctcagctgaccatccgcgtatctggctacgcagtacgttttaactccctgactaaagaacagcagcaggacgttatcacccgtactttcactcagtccatgtaagtggaattgactgaaatcacgcgttaacaagcgtacaataaaggctccacgtcagtggggcctttttagcaccctctccacctcagtctcttttgtccgctatctatactgaatggataacagccaaaacagacttaacacagccggctttgagctgtgcatacacaggccccggacgggccgatgatggagatatcaccgcaatgtcaactattggtcgtattcactcctttgaatcctgtggcaccgtcgatggcccgggtatccgctttatcacctttttccagggctgcctgatgcgctgcctgtactgccataaccgcgacacctgggacacgcacggcggtaaagaagtcaccgtcgacgatctgatgaaagaggtggtgacctatcgccactttatgaacgcttccggcggcggtgtgaccgcgtccggcggtgaagccattcttcaggctgagtttgtccgcgactggttccgcgcctgccataaagaaggcattcatacctgcctcgacaccaacggctttgtacgtcgctacgatccggtgattgatgaactgctcgaagtgaccgatctggtgatgctcgatctcaaacagatgaatgatgagatccaccagaatctggtgggcgtctccaaccaccgcacgctggagtttgccaaatacattgccgacaagggcatcaaaacctggatccgctacgtggttgttcctggctggtcagatgacgacgactccgcgcaccgcctgggagaatttacccgcgacatggggaacgtcgagaaaatcgagcttctgccctatcacgagctgggtaaacataaatgggtggccatgggtgaagagtacaagcttgatggcgtgaagccgccgaaaaaagagacgatggaacgcgtcaaaggtattcttgaacagtacggtcacaaagtgatgtattaaagaaaaggcccggtgagaaccgggccttttttattctatttaaagacgccgttaataacggaagtcacaatcgcagtactcagcgcaattaagaccaggtcgtcacccactacgcgccattcgtagccgggataggaaggaagctggtccagcattgaggccggaacggccttcttcgcaatacccggaggcagtggtttaccgcgcgccaggttttttgcgatccccgggggcagtgacttatagcccgttaagccgtaattcacggccagatgacggacatgatcgaagctcacgcgagcatcaacgtcattaccgacatctttgctgtttttgaagttcttatccgattttccagggttatcctgtccgctattttgcttattaccatggttaccggagttaccagaattcccgttaccatgattgccgccattaccttgtccgccaccgtttccgtgaccaccgccgttcccgttgccaggattagccatgaccggagccgttgcaaacgttaaagacaacactacggcaagtgcggtagtggaaaaacgacgtatagacatgattgttgccttttagtggtagaactcatttgaattatcgccaggcgggaaaaacaaacaatacgtaaaagtcttatatgtgacagggacaaaaaagcctgtcgatgacaggcttttatttaatcaggcgtgtgccacaggcgttggatgttcgcccgctttacgcagcagcattaagagataaataaacgacacgctggcgatcatgataaacagtaaattgtcggaataattttgcatcagcatcgcggtaaacgtcggccctaataagctgccgatggtatagctcagtaaaagcgcctggttcattgccacgagctggtgatgctcaactttctcacaggcccacgccatcgcgaccggataaagcgtgaaacctgccgccccaagaataaacagcgcgggtgccatcgcggcattgctgagcatagcgaggcatcccatgatcaccacgaagacctgaacgcgcagcaccagcagacggccaaagcgatcagccagacggccaattggccattgtccaacaatacccgcactcaccatcaccgccatccagaagccaattccggagtcgctgacgccctgatggttcagataaagcggcatcaggccataaagcgagcccagtacaatccccgagataatgcagccgttaacgcccagacgcgcctgacgcagtctcagcatgggccagacgtgggttgcttcctggtgttcactgttctggttcacaatgcgcgtaaagagcagcggcaggattgcggccagcaccatgcccgttacccacggcagaacgctcatcaggtcggttggcagcttgctcaccatcagttgtcccagcacggtgccgacatagtaaaccatcatgtaggcagccagcaggcgtccgcggttgcgggaggtgccgctgcacatcagcgcactttcaacgaccacccaaatcatcgcgcagcctacaccggcgataaagcgccatgccatccagctccagaagccgaccatcaggcccagccccgcacatccggcggcgaaaatcagcgaggccagataatagctgtggttaaagccaaagcgcttaatcaggctcccggtcaccagcgttccaagaaggttgccggtaaaaaaggacgagctgaccatacccacctgccaggtcggtaagttttcatgggcgagccacagcgggacgagcgtatttaacactgcgatcgccagggtcaacaaaagcaggccacagagcaacagcagcactggccgggtataggtggtcatggattaaaaaccgtgaggaagttcagatttcgtgcgcatcatgccactggcaaaaacaaagtcaatccactgatttagccgcctcgcacaatatgttccctgtcgatttaaaaaacttatcctgctaatgccacgcctgctatagatattaattatgtctctgttttcatttattaatgggcaaaattaaaacaaaacgacagacgaaaaatttcatgatcgaaaaaagaaaaagccgggcactctggcccggcttgatataaccaaatgcaacgttaactggcgacagccataccaacggtcatatgcaacccgtagaacacgccgcgaccaatcagttcacccgccagtaccagcacaaaagccagtgacagcagcggcagcgccggctgataacctttgagctgaggggcaatccagaataccagcgcggcgaccagcagaacgatacgccaggccatcagcgcaccgtagtccggcaccagggcagaggcctgctgaatagagctgtgaatggttgccagttcagaaccctgcatcagggcgactatcgcactcactaccagcgccagcagcgaaacagcgggcagcagacgcattgcccatccgtcgacacccgccacgcgcagcagcaggtagcccagcagcggcccgccaataaacatcgtcaggaagaagctcattggcgtccagacgctgtaccaggtggggacggtatcgatggtgttatagacacgtatcatcatccacacgaacaccacgcccagcaccatggtcacaatcagccacaggctgcgcagacccgcaggcaacttcttcataacggccagcagccagcccagcccaccgacggcaaagaaaattgcgccactggcaatctcgttactgagggatgaggcccccacgcggttcagagagttaaacgcgcgcatcggcgaacccaggtgcagcgtagaggcgataaagccgatccccatcagcacccacaggccaaacatactcaacaccaggcgctgctgctgttcagcattgagacgacctttcaacaacgccagcgcgagcacaatgaagccgccggctacgcactgaccaaagaccgtgaagatcatcagcggccattcatgccatccacttcccatctcacacctccttcggatttgccaggtagccggtggtgtcacctgtaggacggctgttggcgttaggtttaatcacaatactcggcttcgtgaagtgcgcagacggcagcggtgccacggcggcaagctgaccgtgtttttgacgcagctcttcaatcgggccgaagtccagcgcgcgcagcggacaggactcgacgcaaatcggctttttgccatccgctacgcgggtgtggcagccgtcgcatttggtcatgtggcctttagcggcgttgtactgcggcgcgccgtacggacaggccatatggcagtaacgacagccaatgcagacatcttcatccaccaccacaaaaccgtcttcgcgcttgtgcatcgccccgcttgggcagacttttgtacaagcgggatcttcacagtggttacaggcaattgacaggtaatacgcgaagacgttctgatgccagacgccattatcttcctgccagtcgcccccggcgtattcgtagatgcgacggaagctcacgtccggcgtcaggtctttgtaatctttgcaggccagctcgcaggttttgcacccggtacaacggctggaatcaataaaaaatccatactgagttgtcatcggttactccttaaaccttttcaacctggacaaggttagtgtgggatgggttacccttcgccagcggcgacggacgctgtgtggtcagtacgttaatactgcctgcctggtcgatgcggttggcatccgggctgtaccaggccccttcccctaacgccaccacgccgggcatcatgcgtggggtgactttggcttcaatatgcacctcgccgcgaccgttgaagatgcgcacgcgatcgccattgctgatgccgcgcgctttcgcgtccatcgggttaatccacatctcctggcggcaggcggctttcagcacgtcgacgttaccgtaggtggagtgaacacgcgctttgtagtggaagccggtcaattgcagcgggaatttcgccgtcagcggatcgttatagttttcaaagcccggcgtgtagatcggcagcggatcgataacatccccttccggcagctcccaagtggaggcgatttttgccagcgcttcggaatagatttcgattttgcccgacggcgtggtcagcgggttcgcctgcggatcttcacggaacgctttgtacgccacgtggtgtccttccggatcgcgctgtttgtacatcccctgcttgcggaaggtatcaaagtcagggaggtcaggaattgccttacgggagagttcatgcagatggcgcatccacccttcctgagtacgcccctcggtgaactgctgctcaacgcctagacgtttcgccagctcagaggtcatctcataaatggttttgcactcgaagcgcggtttaatcgcctggtcggtaaagatcacgtaggacatgttgccgcaggaggcgtccagcgcgaaatccatctgctcagaggcggtgcagtccggcagcaggatatcggcatattttgccgaggaggtcatgtggcagtcgatcaccacaatcatctcgcacttcttgtcgtcctgcaggatttcatgggtgcggttgatttcagagtgctggttgatgagacagttaccggcatagttccagatcatcttgatcggcacgtccagcttgtccttaccgcgcacgccgtcgcgcagggcggtcatttccgggccacgttcaatcgcatcggtccacataaacatggagatgctggtctgaaccgggttatccagcgttggcatacgttcaaacggcacttcatatgagccttcacgcgcgccggtattaccgccgtgaatgccgacgttgccggtcagaatggagagcatggaaatggcacgggtcgcaatttcaccgttcgcatgacgctgcggaccccagccctggctaatgtaggctggtttggctgagccaatctcacgcgccagctggatgatacgctctgccgggatgccggtgatggtggaggcccactccggcgtttttgccacgccgtcgctgccctgtcctagaatatacgccttgtaatgaccgttagcaggtgcgctggcgggcagggttttctcgtcatagccgacgcagtatttatccaggaaaggctgatcgacgaggttctcggtgatcatcacccacgccagcgctgagaccagggccgcatcggtacccggacgtattgggatccactcgtcttcacgtccggcaccggtgtcggtatagcgcggatcgatgatgatcatgcgggcattggatttggcgcgcgcctgttcgaggtagtaggttaccccgccaccgctcatgcgggtttcccccgggttgttaccaaacagcacgaccagcttgctgttttcgatatcggacggactgttgccgtccgcccaaccgccataggtgtagttcaggccagccgcgatctgcgcagaagagtagtcaccatagtgattgagataaccgccgcagcagttcatcaggcgcgccaccagcgtttttcccggtggccaggagcgggtcagcgtgccgccgagcgtcccggtaccgtagttcaggtagatggattcgttgccgtactctttaataaggcgctgcatattggtggcgatgatgtcgtaggcctcatcccagctaatccgctcgaacttcccttccccacgcttaccgacacgcttcatcggatatttcaggcggtccggattatagacgcggcgacgcatggagcgaccacgcaaacacgcacgcacctgatgtaacccttcgtagttatcgtccccggtattgtcggtttcgacatatttaatttcgccatccaccacatgcatacgcagcggacaacggctaccgcaattaacggtacaggcactccacaccactttttccggcgaagtggccggagacagagcatctgccgccgacgccagtcgggtaaaagggagcgtgaaggcactactggctaccgccaggccgcctattgccgtggttttcatcaacccacggcgagtgacctcggcagccattaatgcttcaggcgcgttgattttcatagagactcactttggttgctcacaaaaaaaagagaggcggcgcaaaccgctatgtagttttatatataacgaatattatcgttatcagctttttatgctggctttcattcgaaggagtattactactttagagggagaggttattgcgtcgtatcaaaccaaaggcataaaaaaagcgccctgaggcgcttttttgttttaagacaaattattagccgatgtactgctggcctttcatgtatggacgcagcacttcagggatctcgatacgaccgtctgcctgctgatagttttccagcacggcaaccagggtacggcccacagccaggccagaaccgttcagggtatgcaccagacgggttttcttatcagatttgctgcggcaacgtgcctgcatgcggcgcgcctggaaatcccagacgttagagcaggaggagatttcacggtaagtattctgcgcaggtacccacacttccagatcgaaggttttgcaagcaccaaagcccatatcaccggtgcacagcgccatacgacggtatggcagacccagcagctccagcactttttcagcgtggccggtcatctcttccagcgcgtccatggattcttcaggacggacgatctgcaccatctcaactttgtcgaactggtgcatacggatcagaccgcgcgtgtcgcgcccgtaagagcctgcttcagaacggaagcacggagagtgcgccgtcagtttgattggcaggtcgtcttcgtcgatgatctcatcacgcacgaggttagtcagcggcacttccgcggttgggatcagcgcgtagttgctgctgtcagcttcctcgtccagcggacgggtatggaacaggtcgccggcaaatttcggcagctggcccgtaccgtacagcgtatcgtggttgaccagatatggcacataggtttcgctgtagccatgctgctcggtgtgcagatccagcatgaactgcgccagcgcacggtgcagatgggcaatctggcctttcattaccacgaagcgagagccggtcagcttaacagcagccgcaaaatccaggcccgcgtgcatttcgcccagcgtcacgtgatcgcgcacttcaaagtcaaactcacgaggcgtaccccagcgtttcacttcaacgttgtcgttttcatctttgccgacaggcacgctgtcgtcaggaatattcgggatagccagggcaatatcacgaatttcggcctgaagaacatccagttcagctttcgcctgatccagttcttcacccagcttgttcacttccaggcgtaatggctcaatatcttccccgcgcgctttcgcctggccgatggatttcgatcgagagttacgctctgcctgcagattttcagtttgtacctgcagtactttacgacgctcttcaagagcgcgcagcttatctacatccagcttaaagccccggcgtgccagtttttcagcgactgcgtctggctcattacgcagcagattgggatcgagcatgcttatcctgtgcttatcgaattaaaataggaaatgtgaccacagcctgcggccacaaggatacaattgccaacattaccgcaacgattgaactaacggtagcgttttatagggctattttgatcctgtccggcgagccaggtgagcttttcaccaatcttgccttcaagacctctgtttgtggggtgataatagcgcgtttgtgccatctcctgcgggaaatattcctccccggcggcgtaggcattgggttcatcatgagcgtagcggtattcctgcccataccccatctctttcatcagtttggtcggcgcattacgtagatgaaccggtacatcgtagtccgggcgttcgcgcgcgtcagacatcgctgccttgaaggcggtataaaccgcattgcttttcggcgcacaggccagatagacaatcgcctgcgcaatggcgcgctcaccttctgcgggtccaacccgggtgaaacagtcccaggccgacagcgcgacctgcatggcacgcgggtcggcattgccgacatcttctgacgcaatcgccagacagcggcgcgcgacgtatagcggatcgccacccgcagtaataatacgcgcataccagtacagcgccgcatccggcgcgctgccgcgcacggacttatgcagggccgaaatgagatcgtaaaaacggtcgcctttattatcgaaccgcgcgctgcgttccccggcaatttcggtgagcagttccggcttcagcacccgcttcccggcgtcgtcgacctcggccatgtcggccatcatctccagcgtgttcagcgcccgacgcgcatcgccgttgaccagctcggcaatcgcacgacgcgtctcgtcaggcagaacgatatcctgtccgccgtagccgcgcgatttgtcgtccatcgcctgagtgagaaccttttcgatatcctcggtcgtcagcgatttgagcaggtaaacgcgcgcacgggaaagcagcgccgagttcagctcaaacgacgggttttcggtggtcgccccaatgaagaagatcgtgccgtcttcaatatgcggcaggaaggcatcctgctggctcttgttgaagcgatggacttcgtcgacaaaaagaatggtgcggcgtccggcgttgcggttctgacgcgcacgctcgatagcctcacggatctccttcacgccggacgtcaccgctgagatacgctcaacgtccgcgttggcataacgggcaatcacttctgcaagcgtagtcttgccggtgcctggggggccccagaggatcatggagtgcaaatgccccgcctcaatggcgcgcggcaaaggcttcccggcagccagcaggtgctgctgaccgatgtactgcgctaaattttctggccgcatacgggcggccagaggttgaaacgcgttatctgaaaaatcgagcgacagattgcccactcacgcctcttacttattgcgttggtcgtccaccgttacgcccttcggcggggtaaaggtgaacttcgatgcatcaacggcgccgttctgctgagatttgagctgatagctgctgcgctgatcgtcctgctcaaccgcgccgaactgattaatggtaccgttggtgctgacattgatggtgaactgcttcaggttgccgttgctgcctttcggcgtcaggacaaactcgtcacccgtctgtttaatattgtactgctgccagtcgctggcctggttacgggcaatcagcataaatggcgtattgctggtggcatctttcagccaggtcgcagtggcctgctcaacgaacgggttgtagaaccataaggttttaccgtcagacaccaggatgctctcatccggctgggtcatgtgccagttaaacagatttgggcgttttacccacaagtccccctgaccttcctgcaccgcgttgccgctgccgtccgtcactttctgcgtgaagctggcgtggaagctgcttactttatccagtcggcttttaaggtcgctggctgcatcagcccagacgctgctggcgacaaaactggtgagtaatgcacaggcgatggcgatttttttcattgttattccttaaaatacgtcttcccgaaatggggtttccgtcttctattctggacctgcccggaggcaggcgacagaagaaaatgcttaattttggctgatttacccttctttgcaatcgcagaaggttaatcaaacggtggcggagccagcacctcgcggttaccgttatgcccctgctcgctcacaatgccctgcgcttccatctgctcgataatgcgcgcagcgcggttatagccgatgcggaactgacgctgtacgccggagatagacgctttacgtttttcggtaacgaaattcaccgcctgatcgaataatggatccagttcttcgccgccgtcaaagccaccgccgccgccttcactttccgtatcgctggtgatgccatcgacgtattgcggacgaccgcgcgctttccagtcctgcacgaccgcgtgcacttcctggtcgcgcacgaacgcgccgtgaacacgcaccggagaggtggagttcggcccggaatagagcatgtcacccatacccagcagcgactctgcaccgccctggtcaagaatggtacgggagtcaattttacttgatacggtgaaggcgatacgcgtcggaatgttcgctttaatcagaccggtgataacgtccacggaaggacgctgggtcgccagcacaaggtgaataccggccgcacgcgctttctgcgccagacgggcaatcagctcttccactttcttaccgacggtcatcatcaggtcagcgaattcgtcgaccagcaccacgatataaggcagtttttccagcaccggatgctgggcatccatgctgtcacccggcttccagtacggatccggaatcggacggcccatgcgcgccgcttcggcgattttctcgttatagccggccaggttacgcacgcccagcgcagacatcagcttgtagcggcgttccatctcattcacgctccagcgcagggcgttggcggcgtctttcatgtcggtgaccacttcagtcagtagatgtggaataccttcatagaccgacagttcgagcattttcgggtcgatcatgatgaaacgcacatcttccggctgcgctttatagagcatgctgaggatcatggcgttcacaccgacggacttaccggaaccggtggtacccgcgaccagcaggtgaggcatttttgcgaggtctgccacaaccggatcgccagcgatatctttacccagcaccacggtcagtggagatgggttatcacggaacttggtgttatccagcacttcacgcaggtagacggtctgacgtttcttgttcggcagctcaagaccaacgtacggtttgcccggtatcacttccaccacgcgcaccgccacggtcgacagcgaacgcgccaggtcgcgggacaggttggaaatacgcgcggcttttacgcccggcgccaggttcagttcaaaacgggtgatcacaggacccggcgagtagttcaccacgtccgccttgatgcggaagtcagccaaacgggcttcaaccagacgggccatctgctccagcgcaaacgtatcaaccggctcgacttctgctggcggcggcgtcagcaggtccagcgacggcagcggcgtgcttggacgctgcagcggacggctgtcaccgttacgcatcagcagcgggtgaatcaggctctcctgcggctgtggcgcaggctgctggaactgcggcggttgctgaacaggttgatgtggctgcgcgtaggcctgtggtgctggctgctggcgcacaggctcagcttccggcatcacgctcggggtaaataaaggctcgcttgggccatcatccaccagatctttcatcggcgagaattcaaagtccgacagtgagaacggatttgcccctgccggctgttcaccggagtaacgctgctgctgcgttgccgcaaactggcgcgctaattcggcttctgccgcatcatcttcgtcttccagcgcaggttcgtcgtgctgatagtcttgaccgtagcgctgattttgctgcgcagcgaactggcgggccagctcgtcctgctgtatttcatcagcatcatcgtcgtactcagactcgcgcgctttttcttcagccatgcgctgggaaggcagcttgatgccataagaagcaagctcacggcgggttggcacgcggacgcggttaggacgaggcagttgcggaccaatcccctctttcacctgaggacgcggtgcgccccctgttgccaggctaaagaccggtgccgccgctgctgcggccgcagtagcctgcttaacgccttccgttacgggtgctacagcaggcgtcgggtcgaccggcggaacggaagcagaaggcgccttcgtaaccggctcctgcaccggttcaggcacaggctgataccaggcggccagctgttcgcgttcacgcgcacggcgctcttcgacttcttcgaaatagtacagcggtggacgcgcaggcttcacctcttccacgatttcaggctcaggttcaggctgcggtgcaacgtaaggctgcacaggttcaacaggttcaggcacgtactcctgataaggctgggacactggctgctgatattgctgcggtgcatactcaggctgcggcggctgataaggctgctgccactgttcctgctgcacggggatgtagctttcaggttcaggcgcaataacgggctccggcgtgtgaacacccggcgcagtctgccagtcaacctgaggttgctgaataacggattccggcggcgggaccggcgcggatggcatcacggcgtcgacaggcgcggcatacgcctgcgcagcggtcgtcgcggcggcggcagccgcaaccggctcggtaaccgagtggccgttcaacagtggatcgtattcgtcgaagtcacccggcgtggcacggctaccggaaaaaagcacatcatcaggatcgacggcggtccctgctgcacggtactcaacctgctcgtcttcatccatgcgtttaccggagaagagcgccgcatcggttttacggcccagcgggttggcaaatttctcagcaacacgctggcgacgcgccagcgcaccgcgcagaattcgggcacgacgagactcgcgacgctgcacaggcgcatcgtcttcctcttcatcttcgtattcgtcttcatcctcccacgtatcgtcacgacgggtacggttactggcgaaggtcagaatggtgaggataaagctgccaattttctcggcaatgctcacccaggaccagccggtaaacagcgtcagcccggctgcccagatgcatagcagcgccagcgtgccgccgctgctgtgcagcaccggctgaagtgcggaacttaataagctgccgattaccccgccagaggcgaagtaccagatatcatccgcattgattgccgccagcccgcaggaggtaaggatcagcgccagcgcgccaatcaggcgcagcgagacggcgaaatagtcgatgtaatcatcgttctgacgatgacgccacgcaaaccagcatccgccaatgataatgacgggaagggtgtaggccatcacaccgaaaatgaaaaacagcgtgtccgcaagccaggcaccggggacaccgcctaaattatggataggctcatgccatgcagtttgtgaccagctgggatcagaggggttgaaactgagtaaggctgccatcagccagacggcaaaaagggcaataacaatcagcaaagcctcgaggagacgacgtccgctgcttagcttcgatagtatgacttctttgtcttcagtgtattcctggctcaagaaaggctctccaggtatcaggcatatcctgcctgtttgctaaaacggacaacagcgccgggactccccggcactgttgctgtatggattaacaggagtgtaatcaaactacgctgattttgcacctgttccgtgttagcgcgtcttaataaccagacgattgctctgtttgacctcttccattaccacataagtacgggtgtcgttcacgcccggcagacgcaacagggtttcccccagcagcttacggtaggcggacatatcaggcacacgggttttcaacaggtagtcgaaatcaccggacaccagatgacactcttgaatttcttcaagtttttgtacagcggcgttaaattgctcaaacacatccggcgcaccacgattcagagtaatctcaacaaataccagaagtgaggcatccagataatgcgggttcagcagagccgtatagccctgaataaaaccctgtctttccagtcggcgcacacgctcaaggcacggcgtcggggaaagtcccacacgttttgaaagctcgacgttggaaatacgcccatccttttgcaattcattcagaatgttacgatcgatacggtcgagatctttgccagggcgcttcttgctatctaccattattattgtctctctgtattccttccctactcctgcctggaccctgtgcacatcactgttcagagcctgtacccgttagtcatcacatcgcctggttttgtattagacgcgatgcggattcgggttctgttggtaagaagaccgttgcccgaaggctgtcaccgacatcacgtatggcgtctgtccacgccatgcgtagatttcactgacccggtaaaaatggcatttacgtgcatgcctatgcggcatacggttaacgcggttttttttcttccttgaatgttttcgcaaaagcgcaggggattgtcaaagcaaaacatcgttttttagtacaacatgccggatattcattacgacagggtattaatcctcattttattgccttataaacgaccggttttcttaagaaagcgtgatgttatcgcgcgcgattcatcgtctacggctattacacagattgatatcaaaattgctgcgctctttttttacggcaacaaattccctacaatccagccaaatgtctgccaacaacaatggggatctcatgggcacggccaaacacagtaagctgctaatccttggttctggacctgcgggatataccgcagcggtctatgctgcgcgcgctaacctgcacccggtactcatcaccggtatggaaaaaggcggtcagctgaccaccaccaccgaagtggaaaactggccaggggacccgaacgacctgaccgggccgctgctgatggagcgcatgcacgagcatgccgctaaattcgaaaccgaaattctgttcgatcacatcaacaaggtcgacctgcagaaccgtccgttccgcctgacgggtgacagcggtgaatacacctgtgacgcgctgatcatcgctaccggcgcctctgcccgttatctcggtctgccatccgaagaagcgtttaaaggccgcggggtttctgcctgcgccacctgcgacggtttcttctatcgcaaccagaaagtcgcggttatcggcggcggcaacaccgcggtggaagaagcgctttatctggccaacattgcctctgaagtgcacctgatccaccgtcgcgagaccttccgcgcggagaagatcctgatcaaacgtctgatggataaagtggcaagcggcaacatcgtgctgcacaccaaccgcaccctggaagaggtgacgggcgaccagatgggcgttgccggtctgcgtatccgtgatacccagaacaccgataacgtcgaaacgctggaagtggcgggtctgttcgtggctatcggccacagcccgaacaccgcgatcttcgaaggccagctggagctggaaaacggctacatcaaagtgcactccggcattcacggtaatgcgactcaaaccagcatcccgggcgtattcgcggccggcgacgtaatggaccacatttaccgtcaggcgatcacctctgcgggcaccggctgtatggccgcgctggacgctgaacgctacctcgatggactggctgaacaacgtaaataatctttacaagtcagtaacaaacgtaaataaaggcggcgataagtcgcctttattgtctccccgttgtaacattgcgctgcccaacttctaataacgtcacctgcaaagtacgcaatggaaaaaacccgtcaacaagagttaacacgctggctgaaacagcaaagcgttctttcccgccgctggcttacgatttcccgtattttgggtttcatcagcggtctgttgattgttgcccaggcatggctgctggcccgcattcttaatcacatgatcatggagaacattccccgcgaagcgctcctgctgccctttattgtcctgatcctgatttttatcctgcgcgcctgggtggtgtggctgcgtgagcgcgtcggcttccacgccgggcagcatatccgctacgagatccgccgtcaggtgctcgacaggcttcaggaagccgggcccgcgtggattcagggaaaaccggccggtagctgggcgacgctgatccttgagcagattgacgatatgcatgactactacgcgcgctatctgccgcagatggcccttgccgtcttcgttccgctgctgatcgtgatcgccattttcccggtgaactggatggcagcgctgattctgctgggcaccgccccgctgatcccgctttttatggcgctggtcgggatgggggcagcggatgccaaccgccgaaacttcctggcattgggtcgcttgagcggtcattttctcgatcgccttcgcggcatggagacgttacgcatttttggtcgcggtgaagcggaaaccgaaaatattcgcctggcgtcgcaggacttccgtcagcgcaccatggaagtgttacgcctcgccttcctgtcctccggcgtactggaattcttcacctcactgtcgattgccctcgtggcggtctacttcggcttctcctacctcggcgcgctggatttcggccattacggcacggcggtgaccctttccgccgggttcctggcgctgatcctggcgccggagtttttccagccgcttcgcgatctggggaccttctatcacgccaaagcccaggcggttggcgccgccgatagcctgaaaacgttcctggaaacgccgctggcccacccggagcgcggtgatgtaacgctgaatgctaaagactccgtgaccattgaagcgcaggacttttccattctgtcgcccgaaggcaaagtgctcgccggtccgctgaactttaccttacctgccggacaacgcatggtgcttgttggcatcagcggttccgggaaaagttctctgctgaacgcgttgtccggatttatggcctacacgggttcactgcggatcaacaaaaccgaactgcgtaacctcgatcctgacgcctggcgtaaacagctcagctgggtaggccaaaacccgcagcttcccgccgcgacgctgcgcgaaaacgtgcttctggcgcgcccggacgcgcgtgaagatgagctgcaatcggttctcgaccgcgcctgggtcagcgaatttctgccgctgctgccgcaagggttggataccgtagtcggcgaccagtccgccgggctgtcggtcgggcaggcgcagcgtgtggccgttgcccgcgcgctgcttaacccatgccaactcatgctgctggacgagcccgcagccagccttgacgcacacagcgagcagcgcgtaatggaagcgcttaacgccgcctccctgcagcaaaccaccctgatggtcacccaccagctggaagggattgccgactgggaccagatctgggtcatggaaaacggccgtattgttgagcaaggcgactacgcctctctcgttgccgcccaggggccatttgcgaccctgctggcgaaccgtcaggaggatatctgatgcgcgctctgctgccttatcttgcgctctataaacgccacaaatggatgctgacgctggggattgtgctggcgattgtcacgctgctcgccagcatcggcctgctcacgctttccggctggttcctgtcggcctcggccgtcgcggggttcgccggattatacagcttcaactatatgcttccggccgccggggttcgcggtaccgccatcacccgtactgccggacgctatttcgaacggctggtcagccacgacgccactttccgcgtgctgcagcacctgcgtatctatacctttagcaaactgctgcccctctcccctgccgggctagcgcgttttcgtcagggcgaattgcttaaccgcgtggtggcggacgttgacacgctggatcacctttacctgcgcgtgatttccccgatcgtgggcgcgtttgtggtgattgtggtggtcacgctggggctgtctgttctggatgttcccgttgcgctgacgctgggcgggatcatgctgctgacgcttatcgttctgccgccgcttttttaccgcgccgggaaatccaccggggaaaacctgacgcgcctgcgcggggactaccgccagcagctgaccgcctggcttcaggggcaggcagagctgaccatttttggtgccagcaagcgctaccgcgcgcggatggaaagtacggagctgaactggcatgaggcccagcgccgtcagtcggagctgacggccttctctcaggcgctgatgatgctgatcggcggcgtggcggtaatagccatgctgtggctggcttccggcgatattgggggaaacacacagccgggtccgcttattgcccttttcgttttctgtgcgctggccgcgtttgaagcgctggctccggtgacgggtgccttccagcatctgggacaggtcatcgcctctgccctgcgcatcacccagattgccgagcaggagcctgaagtcacgttcagtgccgggcagaccgttgtccctgagcaggttgcgctgacgcttgaagatgtcaccttcagctatgacaaacaggcgcagaacgcgctggacggtatcaccctttctgtgaaagccggccagcggattgcgatcctcggccgtaccggctgcggtaaatcgacgctgctgcagctgctgacccgcgcctgggacccgcagcgcggtcagattcgttttaataatacgttgctgaccgatttcagcgagcaggccctgcgcaaaaccgtcagcgtcgttccgcagcgcgtgcatctgtttagcgccaccctgcgcgataacctgctgctggctgcgccagaggcctctgatgatgcgcttcgcgccgtgctggaacaggtcggtctgcataagctgcttgagggcgatggactgaacagctggctcggtgaaggcggtcgtcagctttccggcggagagctgcgccgtctggcgattgcgcgcgcgctgctgcacgatgcgccgctgatgctgcttgacgaacctaccgaagggctggatgccacgaccgagagccaaatacttgatttgctggccaatgtcatgaccggtaaaaccgtcctgatggtcacgcaccgcctgcgcggactggcgagttttgatcggataattgtgatggacaacggacacattattgagcaaggtagtcacgcagagctgttggcgaaacagggtcgctacttccagtttaaacagcgtctgtagactatatttgtagcgtcctcactcgcgtactggagttttgctgtcatgcgcctggtccagctttctcgtcataacatcgcgttcccttctcctgaaggggcgctgcgtgagcccaatgggctgctggcccttggtggtgacctcagccctgcgcggctgttgatggcgtaccagcgcggcatcttcccctggttttctcccggcgacccgattttatggtggtctcccgatccgcgtgccgtgctgtggccagagcagtttcacctgagccgcagcatgaagcgtttccatgcaaaatcaccgtaccgcgtcaccctgaaccacgcctttggtcaggtcattgaaggctgtgccgaagaccggtttgagggaacatggataacccgggatatcattaccgcctaccaccagcttcacgagcttggctacgcgcactccattgaggtgtgggacggcggagcactcgtcggcggcatgtatggcgtggcgcaggggacgctgttttgcggtgagtcgatgttctcccgcgcggttaacgcctcgaaaacagcgctgctggtcttctgccaggcatttgcccagcgcggcggacgcctgatcgattgtcaggtgctcaatgagcacacggcttccctcggcgccgttgagataccgcgacgccagtacatcgagcatctggatgccagtcgtcaggaaaagctcccgcgcgacttctggataccgagaacgctctttatgcccaatgcctaaatgttttccgcatattttttgtgagggtgttataattacgccgcagagtagcttctgcctgttgccccgccgccgtttgggaccttcgcttcagataacgtcctgacgtttatcctgttgtatcccctttacgaatgcgctttccgttcggttgtaccgtgacgcttgggcaatgcgccgaaactgttttgctgcgtttcaaacgcgcaattctttacttaattgatgaatttcggcattatcttgccggttcaaaacttggtagtgataccccagaggattagatggccaaagaagacaatattgaaatgcagggtaccgtacttgatacgttacctaataccatgtttcgcgtagagctggaaaacggtcacgtggtaactgcgcacatctccggtaaaatgcgcaaaaactacatccgcattttgacgggcgacaaagtgactgttgaactgaccccgtacgacctgagcaaaggccgcattgtcttccgtagtcgctaattgttttcgcctgtaatggcagatgaatattaaataaggccgggatattcccggccttatttttgtgtgtcgcagtcgattatttgaacaattatttagccgttcgttccagcttcagggctgtctgttcgacagtgtacggtgcaaggactgtgaggccttattttctattttgctgagctgcgtgtgcggcagtgcatccttatactcactccatcactttgattccagctttctaagctgcctgtacggcagtgcaccaggtcgggcggtatctcgaaaagctcatggttttctaagctgcctgtacggcagagcacctggtcacgctgcctggcgctgtttttctttatttctaagctgcctgtacggcagagcacggctcgaaattagcccgaccccattatcactttttctaagctgcctgtacggcagagcaccggcgcaggccatgcatgggctgatggttacctttctaagctgcctgtacggcagagcacaacccattcgacgcagtgatgttcgtgctgcttttctaagctgcctgtacggcagagcacgtaacggtgaccccgttgatttggatgtgttttttctaagctgcctgtacggcagagcactgaaataatatctccacacccttctgatttgcatacaaaaaaagctaaaaatccttctctcaccctctttttcatccaccagaaataatcatttaaaatcaatctattacacaaacgctaaaaattagggtcaaaacacctttcttcgcattaatcccccacacaaaaacacccattccacccaccctgacaaatggctatacttaaccatgacaaataacatcactcaggaggtgacatgagaacatggatccccgcacagaaacctgctgataacgcactttggcgttacgccggtttacccgccaaccgaggtatgcggttgattgaatttctcaatcagggattacccgtcagtgtgctcgacaacatccacgagtggacgtccatgtcgaaagcggacattttgcgtgtcacgggtatcaacgaacgtaacgtggcccgccgcaaaagcgcgggacggacgttaacgcccgacgagagcgaacgcgtggcccgtttcgttcgggtgctggatgctgccgttgactattttggcagtaaagaagaagcatggacctggctgcaggcaccggtgcgcggactcgggaacgtggcgcccgtcgacttaatagcgacggaaaccggtgcgctggaagtcaccgatttaattggccgcctggaacacggcgtgttcgcatgattttttatcgtctggtgacaggacgctatgccagcggggcgtggagtgggagtggtgcaaatcagtatggcggacggtggaatcataaaggccatccagctgtgtatgtctccacctccatctcgctggcctcactggagattttggtacatgtcagaaaagataccgtgctgaatcagtaccagcttttcagcattgatatcccggatgaccagatagattacctggataaagcgtggctccctgaggactggcaggaaaatccggcgccggtatcgacaatggatctgggaaccggttggttgcaggctaacagtgccctcgcgcttatcttaccttcctgtatcattccttatgaaaacaatgccatccttaaccccttacatccggcgttccactcggcgctcaattcagttcagcaactcccctttatttttgatacccgcctggctgaaaaaaccgcaccctgaacgcggatgcggttatgcgtatcagaaccagggaaccgtcgccgtcgcactgagtccgtaggtcgtaaacatcccggagacaggcgtagagagcaaatcaccatggcgaatgaagagcttaaaagactggccggtagagagactgcgcaggttaagccagggtaaatccgtcctcacttcctgcatcgtcagaagacgttgttgcgcctcctcctctgttaaccatccttttttcaccgagcgtcgcatgagcctctgcgcactgcttttcacctggacgcggctcacgcagcgccactggttgacgacaggcacgggctggatgtctgaggacatgcagtagtcactcaaccctttccgccaggacaatgcttcaagttcgcttagtgcctgatgatgaccgtgcacgcgtaagacggggccaagcttaaggccatatgccgggaagctgatccctatatccccctgccctctttgtcccagcgcgcggtgcagtttagccaccagcgcagccatcagcatctcctcgctgaactccggatcgggcagaacgcggatctcaagatagtgatccatagccactccttaatcgcccttctcaccgaaaacgccaccgcggatcagcacagccatgacgtaatgctgctgctcaacctcgggtttcagtcttttcgtcacccagttatccagcaaggtgtagaagtccattttttccttcggctgacgacaggccacgccgcgactggtgactgagccgtacggctcaacggcgatagcgcccagcgcatctacctgagggtgccaggtatcaatagttcgaatggcattcccgattttctgcgagtgcatgcccgcaacgctgtctacctgatacaacaggcgactcttgctgctgttgctgtccaggaccagctcctgcgacgggaaaatctcctgtccggcaccgaggagcacctgcgcttcgacgttcaggagaacaaaccctccaccgctgagccctttttcgatttcctgcgccagtgcgtttaggctctcgtcgctggctgtaaaatctcgcagcgcataattgtatgcatcaaacgtccacgacttactgcccgtcacgttcacgatgattttttcagcaccgacgcggttgcgccataaaaaacgcccgttcgccaggttagttgcgtagcggcgcgccagttcggcaaaaccgtgttcagtgatatagccatcgataacctgctgaagttcatcctgatacgcgcgatcgttacatacggaaggcgtcgacaggtttcccagcacgcgcagggtaaatttcaccttcagggtgtctgcatcggcaggtagcgacgccacatccacacgatgcaggttcgctttctggatctcggtatccagtttagccggatcgttggtgagcgcatttttcagacggttagagatggtgccacgcaccgctttttcctggatgcggatcggttgccactgattgccctgccagcttccggaatacatcactgcatccgaggttgccagcttacgttcaaatgccagtacagatgccgttttaacggccgttggagcctttgccatagataagtcctttttaattaataagttctgatgtcaccggtgcgcccgcgccctgacagtagtagcctgtttccgttgtccgataacgccagaaaatctcgtccagtgaccgaatccggtgcagaccgcaccactcgcccacgccatacaccgcttcggtaaacgcaaagggcgtttctgcatcacgcgcgtttgccacgacgcccggcgcgtagagttcagagatgcgctgatagcccgtcatcaacggcaccagataaccggggttgggtttcggaacaacgtgccagttggccggttcgccttcctggatatcgctatcctctggcgtttctgcctgtatttttagcgcggcaaaatccagccaggcgtcgagaagcgttgcatccgggttatgttcaagcagagtcgtatgatgctcgcccagccagctgctgcgatcccgcaaggcaaagcccggcattagttgccacgttagtcgccccatctcctgagcgctggcaggcatcgccataaccgaaatgtcctggatatcgacgatgattccccccgcaagtcggagcgtcggacacacctgcctgagatgctcggcaagatcgcgctgaccgtattcgccatttggaatttccccgtgacactccagcagcagcgaaaccgtcatgtgcatgcgcccctcttcgttaaaggaggccgttttcgcgtcccgtgtaagcggattgcgggtcagggcaaactgataatcgcggccagaggtgtgcgcgtggatctggtgctcgtggctgatcacggcacagccatcaatgcgtagctcgtgcgtttcggtcagacggcgagacagcgcatgggaaaatcccaggaaatgggtaatggcgggaaaaccgtaagtcaggccagcaatcgcgttggcgttttcaactctcacacggcgaagcaggatcagtgagctcatttcagcgcctcccggataattttttccatctcacgcaggttgctgcgtaaacgctcacgggtttgccattcacgctgttccacataccccacatcctttaatgccttgctcaggcgcgcgttaagccacagggcaaaatctgttgcgacgcttacctgccagtcgtctttatcccgctcgagacgaaaagcctcatcggttttggtgcgccagggatcgagccagagttgttgatgagtgactaatcgttcgcacgagagcgtccagttttgccatgtatcacgctgtagttccgacgccaccacaaacagcaggtcgataagcgcatcaatgtattcatcacgcgcttcgcgaatacgaacattggtgtaatcaccggttctggtcaataaagacacaagcagttgaacattgctgtttgcacgtcgatcaaactgaccacctaaagtgaaaacagaacgtaacgtcgtcggcggcttgtctgcttttttccactgcggcggctgacaggaaagcagccagctacgcccgctgcggacactgttgagataggaaatgttttgtggtttggtgccaccaaagtgtatttccgctgaatccgggaaaagcgtcagcggagtgggatgccaggttttctcccggcgcgctttccagatagctttaacatcgtcgccaaaacggaaggcaatcattttctgatgcatggcgtgaacaagcgaggtggcaaataacgggctcagcagatggtaactttcacctaccgggaaatagccctgcttagccaatttgtgcgaagcgggttctccggacgttaacgcacgggaaaatcccgcaatccattcacctagttggttcgcatcatcggtaaaagcggccagcgcagcgcgatctccgcgtttcaggcttgccagtagagaatcaccaccgttaacccgtgtttgcagcaatttcgcgacgtccagcgccgcggcgtttcccacggcatccggttccagacctgacaacgcagcggtgctgagatacccttcctgcgccactgcctcgctgtaaatactgctactttttgaatccccgtgggtaaatttcgccgcatgggtcacgaggttaatttgtccggctcgcttcgcggcatccgtcagccaggctttcggttcatagcgaagctccagttcccggcgttctgccgcaagcgtcgcgctatcttcagcgctgcgttttgcggcctctttatcaaatgcttccagctttgtttgccgtcgtccggcaatataagttgaaagaaatgagaataaatctccttccttcataaatccccttaatcttattgcattcataaacaacagaaataaaagaacaaaatcttatagtcagtataaattactcgaatacaaaaaaagcataataataaccatgacaaatacaaacttattaataataatcaccatgaaatattcccttatccaagataaaaataaagtacgttatttcaatggctttatccacacctatattatgtctttgtcctcaataatatgaacttgtcaaaaaccctcaaaataaatacaatcgccttcgactgtcgtttagatagcttagaaatatatgatgtccttgtcatttatttaccactgctgtacaagcagctcgcgccctctttcagagggcgcgaaacacacctagccttaccggaaggcgtgaatggccatgcgctggtgtggcggtatgtgaatgatttcggtgcgattagccaggatttaaaagcagcgctttaagcaaaggatggtttatttatggagtgttcccgtattttcatcgcgtttgcttccggggtggtgcttggtttatccgccgagacggcagcgagggatatgtttaaccctgcgttgcttgaaatcgatcatcctgtggacgttgatatccaccagtttaaccgcgcgaacaatctacctgccgggaactataaggtcagtattcatgttaacggcgaatatgttgaccgccgggaggtgacctttgtcgaagatactgccaccagcaaccttcatccttgcttctcagccgtcaaaaccgtgctcgctgagcttggggtaaaagtggcgtctatcaaggcccttaacgacatagatgacaaagcctgtctgaaccccgcgccgctcgttcccggctcaacctggacgtttgatacggataaactccagcttaacgtcacgttgccgcaaatctatattgatgtatcggcgcgcggctatatcagtccctcacgctgggatgagggcatcaatgcgcttatggtgaactacgatttttccggctccagcacggtgcattcgaacgaggatgttaacgacgatttttattatctgaacctgcgcaacggtgccaacctgggggcatggcgtttacgtaactacagtacgctaaacgtggccgatggcgagtcttcgtatcattcgatcaatacctatttacagcgcgatatcgccgcgttacgcagccaaatcatgctgggggatacgtggaccgcaagcgacgtgtttgacagcacgcaactgcgtggtatgcgtctctacacggatgatgacatgctgccttcgagcctgacggggtttgcgccagtggttcgcggcgtggcgaaaagcaatgcgaccgtgattgtgcggcaaaacggttacatcatttaccagtctgccgtaccgcagggagcgtttgcgctcaaggatttaaacactaccaattcgggtggcgatctggatgttaccatcaaagaagaggatggcagcgagcaacattttacccagccttacgcctcactggcgatcctgaagcgtgaagaccaaaccgatgtcgatatcagcgcgggtgaactgcgcgatcaaaacgattttcagccgaccgtttttcaggcgcaggtgttacacggttttcctgcgggtattaccctctacgggggcgtgcagggaaccagcgattacacctccgccgcgcttggcgtggggaaagatatgggttcgctgggcgccatttcgctggacgtaacgcatgcccgcgcgcggtttgaggacgatgacgaaagcgggcaatcttaccgttttctctattccaaacgttttgatgaaactaacacaacgtttcggctggtgggctaccgctactccacagagggctactacaccctgaacgaatgggcgtcccggcagaataacgagagtgacttctggacgacaggtaaccgccgtagccgtctggagggaacatggacgcagacctttggcgacgggatgggaaatatttatcttacccttagccgccagcagtactggaagacgaatgaagtcgagcggctggtgcagctgggctacagcaatagctggcgctctatttcctggaacgtctcctggaactacaccgattcactcacctcggcccaaaatagcaccgacactgacatcagcgacagccagggcagcgaacagatttttatgctctctctctccataccgttgtcaggctggctgcatgatagctacgtcaactatgggtacacccaaaacaaccatggaaaagggatgcaccaggtggggctgagcggtaacgcgctggatgcgcacaacctctcctggaacgttcagcagtcttacgatgcggataacgaagattacaacaacagcgcaggggtgggctatgacggcacatatggttcggtaaacgccagttacgactatacccaggacaaccagcgcctcaactatggaatgaagggcgggattctggcccacagcgatggcataactttctctcaggagctgggggaaaccgtcgcgctggttaaagctccgggagcttccggcctggcgctggagaatggtacgggtaaggcgacggactggcgcggctatacggtacagacgcagctcaatgcctacgatgaaaacagagtggagatcgacagcgattactttgcgaaggccaacgtcgaaatcgacaacagtatcctcagcgttatcccgacgcgcggcgcggtggtacgggcggagtttgtcactcacgtgggctatcgcgtcctgttcaatgtgcggcagaagagtggcaaaccggtgccgtttggcgcaatggcctcggctgatttaccccacggcagcgtaaccggcattgtgggcgaaaatggcgagctttatctgtccggcatgccggaagagggggcgtttgtcctgaagtggggtgcagataacacgatgacctgcccggttaactaccattttaccccgccagaaggcgttgaactgatacaaatatcggcagtatgccaatagggaaataagatgaaattcaggacacctctgtttttaagcgcgttgataatatttatgacgccagtatgcaaagcgtacaccacgggcgacgggatttgtcactccgaaggtggcgcttatatctataaccttaatctgaacgggcagtcgatcccggcggataaaaataaagcaggtacagagatcagggatctggaaacgctcagttcatctacgagttacaaagcgcaatgcaactgtcttacgcattactctacgggctttcgccaaatctactacaccgcacgatcgccgttaagtgaagatgtggtaaagaacgggtatacctattttacccttaataacaacctcagcatcgccacgtcgatacttgtgcttggcagagaatatataccggtacctttcagcgcagaaccaaacgtaatgtctcatagctcctattgttatgcacctggcgaggaagggagcgaaccaacactcaataccggttcacaaataaaaatatcattcttaattaacaagccgtttattggccgggtgagtgtgccaggtacgatagtcgccgatctttatggagggctggatgcggcctcctcgacctccagcaccgaaaaaatggcagagatcaaaatcgctggcgatatcgtcgtgccgcaaaattgcgagatagcgcccgggcagacgcttgagatagattttggcaaaatcccggccccggaattttccgctaccaaaggcaccgccgtgacgagtcacaaggtaaaaaagacgattcaggtacagtgcacaggcatgctggatgagaatattgtctactccactttccatggagaccctgttgacgccgatgccacgatgatgaaagtcaacggcaatgatgatgtaggcattgtggtatacgacaagtgggatcgtcaggtcagcgtcaacggcggcaggatggacatggataggggcgaaaacaataacggcgccgaaaacaattcgcttaccttttccgctgcgcctgcaagcgcaacgggggctcagccaaaacctggaacgtttgaagcgtacgcgacggtcacgctggaaattgaacattaatcacccgacggctgtttatgacagccgttgtcattttcccccttttgtaccaggcttatccctttctgtatgacaactctatgacgcaatcctgaataaatatcatttattatcaatgagttatttttaacgcctgcattgtcataaaactgtcataattcgtacatttatctgtcacctgtttgtcctattttgctcatcgtagccactaaacaacgatttacgaaaatcttgcaggagacattatgaaagttatgcgtaccactgtcgcaactgttgtcgccgcgaccttatctctgagcgcgttctctgtatttgcagaagcaagcctgactggcgctggtgcaaccttccctgcgccggtgtatgccaaatgggcggatacctaccagaaagaaaccggtaacaaggttaactatcagggtatcggctcctccggtggcgtaaaacaaattaccgcgaacacggttgatttcggcgcatcagatgctccgctgtctgatgacaaactggctcaggaaggcctgttccagttccctaccgtgatcggtggcgtggttctggcgatcaacctgccgggcgtgaagtcgggtgagttggtgctggacggcaaaaccctgggtgacatctacctgggcaaaatcaaaaaatgggatgacgaagcgatcgccaaactcaacccaggcctgaagctgccttctcagaacatcgccgtggttcgccgcgcggatggttctggtacctctttcgtgttcaccagctacctggcgaaagtgaacgaagagtggaaatctaaagtcggctccggctctaccgttaactggcctaccggtctgggcggtaaaggtaacgacggtatcgccgcgttcgtacagcgtctgcctggctccatcggctacgtagagtatgcgtacgcgaagcagaacaacctgtcctacaccaaactggtgtctgccgacggcaaaccggttagcccgaccgaagagaactttgctaatgccgccaaaggcgctgactggagcaaatccttcgcgcaggatctgactaaccagaagggcgaaggggcgtggccaatcacctctaccaccttcatcctggtgcacaaagagcagaagaaacctgaacagggcgctgaagtgctgaagttcttcgactgggcatacaaaaacggcggcaaacaggctaacgctctggattacgccaccctgccagacaacgtggttgagcagattcgcgctgcatggaaaaccaacgtgaaagacagcagcggtaaagcgctgtactaacaggatatatttaacgaagatggcgggtggcgctgcgcttacccgccctacggtttactctgtaggcccggtaagcgtcagcgccaccgggcatattcgtaaaaacgtctcaaacagaagagtaatttatggctgcaaccaagcctgcatttaaccctccgggtaaaaaaggtgacatgattttcagcgcgctggtcaaactggctgcgctgattgtgctattgctgctgggcggcattatcgtgtctctgattttctcctcctggccgagcatccagaaattcggtttctccttcctgtggagtaaagagtgggatgcgccgaacgatatctacggtgcactggtgccgatttacggcacgctggtgacctcgttcatcgccctgctgattgcggttccggtaagtttcggtatcgccctgttcctgacggagcttgcgccgggctggctgcgtcgcccattgggtatcgccatcgaactgctggcggccatcccaagtatcgtctacggcatgtgggggctgtttatctttgcgccgctgttcgccacgtacttccaggaaccggtgggtaacgtcctctctgccattccgtttgtgggggccttgttctcaggcccggctttcggtatcggcattctggcggcgggtgtgatcctcgccatcatgattattccgtacattgcggcggtgatgcgcgatgtgttcgaacaaacgccggtgatgatgaaagagtcggcctacggtatcggctgcaccacctgggaagtgatctggcgcattgttcttccgttcaccaaaaatggggtgatcgggggcgtgatgctgggcttaggtcgtgcgctgggtgaaaccatggcggttacctttatcatcggtaacacctaccagctcgacagcgcgtcgctctacatgccgggcaacagtattacctctgcgctggcaaacgaatttgcggaagcggaatccggcctgcacgttgcggcgctgatggagctgggtctgattctgttcgttattaccttcattgttctggcgatttccaagctgatgattatgcgtctcgctaaaaatgagggagcacgctaatggccactctcgaaatgcaagctactgctgaactggcggaatcccgccgcaaaatgcaggccagacgccgcatgaaaaaccgcattgccctgacgctctctatggcgacgatggcattcggtctgttctggcttgtctggatcctcttctcaacggtcgttcgcgggattgacggaatgtcactctcgctgttcaccgaaatgacgccgccgccgaacacggcgggtggtggcctggcgaatgccctggcgggcagcgggttgctgatcctctgggccacggtcttcggcacgccgctgggcattatggcgggtatctacctggcggaatacggtcgtaaatcctggctggcggaagtgattcgtttcattaacgacattttgctgtcagccccgtctatcgtcgtgggtctgttcgtttataccgtcgtggtggcgcagatggaacacttctccggctgggcgggcgtcattgcgctggcgctgctgcaggtgccgattgtgattcgaaccaccgagaacatgctaaaactggtgccggacagcctgcgtgaagcggcttacgcgctgggtacgccaaaatggaagatgatctctgcgattacgctgaaggcgtcggtctccgggatcatgaccggtatcctgctagcggtggcgcgtattgcgggtgaaacggcaccgctgctgtttacgtccctctccaaccagttctggagcacggacatgatgcagccgatcgccaacctgccggtgacgatctttaaatttgcgatgagccccttcgcggaatggcagcagctggcctgggccggggtgctgatcattaccctttgcgtactgttgctgaacattctggcgcgcgtcattttcgcgaagaagaaacacggttaattttttacggcgcggcagctcgcggcgccgaatgaggaaatgagtcaatgagtatggttgatactgccccgggtaagattcaggttcgtgatttgaacttctactacggcaaattccatgccctgaagaacatcaacctggatatcgcgaagaaccaggtcacggcatttatcggtccgtccggctgtgggaaatccacgctgctgcgtacctttaacaaaatgtattcgctctatccggagcagcgtgctgaaggggaaatcatcctcgacggtgaaaacattctgacccaggctcaggatattgccctgctgcgcgcgaaagtggggatggtgttccagaaacccacgccgttcccgatgtccatttatgacaacatcgcctttggcgttcgcctgtttgaaaagctctcccgtgccgatatggatgagcgcgtgcagtgggctttgaccaaggccgcattatggaacgaaaccaaagataagttgcaccagagcgggtactctctctccggtggtcagcagcagcgtctgtgcattgcgcgcggtattgcgattcgcccggaagtgttgctgctggatgagccgtgttcagcgctggacccgatttcaaccggtcgtattgaagaactgatcaccgagctgaagcaggattacaccgtggttatcgtgacccacaacatgcagcaggctgcgcgttgctccgatcacacggcgtttatgtacctgggtgaattgattgagttcagtaacacggacgatctgttcactaagcccgcgaagaaacaaaccgaagattatattactggccgctacggttgatttgccttagtgcatgtggagaaaccatggacaacctcaatcttaataaacacatttccggccagttcaacgcagagctggaaagcattcgcacccaggtgatgaccatgggcggcatggtcgagcagcagctttctgatgcgattacggcgatgcacaaccaggacagcgagctggcgaagcgcgtcattgaaggcgataaaaacgtcaacatgatggaagtggctatcgacgaagcctgcgtgcgcattatcgcgaaacgtcagccgacggcgagcgacctgcgtctggtgatggcgatcatcaaaaccatcgccgagctggaacgtattggtgacgtcgccgataaaatctgccgcaccgcgctggagaagttctctcagcagcatcagccgctgctggtgagcctcgagtcgctgggccgccacaccgtgcagatgctgcacgacgtgctggatgcctttgcgcggatggatctggacgaagcggtgcgtatctaccgtgaagacaagaaggtcgatcaggagtatgaaggcatcgtgcgccagctgatgacctacatgatggaagattcccgcacgatcccgagcgtgctgacggccctgttctgcgcgcgctccatcgagcgtatcggtgaccgctgccagaacatttgcgaatacattttctacttcgtgaagggtcaggacttccgtcacgtgggcggcgacgagctggacaagctgctggcgggtaaagatccgaaagagtaatcctgtcatctgataacaacgccggtactcaccggcgttgttatttctagtgtaatcacaattttccccttcatccgttgcctgacgttcgaaacgcgctaacgtgagacgaaaaatagcaaaggatggtatatgaaaaattcattagcgtgcctggcgatggccatcagcatcgggatcggtactggaacagacgtgattgccgcaccgttgccggtcacacctgaccagactaccccggtcagccactatgtgacccaggttaatgcggataaaagcattacgtttcgcctgtttgcacccggcgcaacgcgagtctccgtggtgacggggtcaatgcctgaaagccaggtttcccatgatatgacgaaagagaaaaatggcgtctggtcatggaaaagcgagccgatggcaccgaatctgtacgaatattatttcgacatcgatggtttccgttcagttgacacgggaagccgctatcaaaaaccccagcggcaggtgaacaccagcctgattctggttccgggcagtattctcgacgatcgtcctgtaccgcatggcgatctgacgaccttgacctggcactcgccgtcgctcaagtcagagcgccgcgtctatgtatggactccccctggctacaacggcacaggggaacccttaccggtgctctacttctaccatggttttggcgatacaggactctctgccatcgaccagggccgtctgccgcaaatcatggataacctgatggccgaagggaaaatcaaaccgatgctggtggtggtacccgacaccgagacggagagcactgaggccatccccgagaacttcccaccggcagaacgacggaagtctttctatccgctcaatgcgaaagccgcagaccgtgaactgatgagcgagattattccgctggtggatacacgcttcaacgtgcgtaaagatgcggcaggccgggcactggcgggattgtcacagggcggttatcaggcgctggtctccgggatgaatcatctggagagcttcggctggctgggaacgttcagcggcgttaccacgacaaccgtgcctgacgaaggcgtggccgcacgctttaagcagcctgaggccattaaccggcagctgcataacttcaccgtcgttgtgggagagcgcgattcggtgaccggcaaagatatcgccggtctgaaagcggagctggaaaagcagggcatcaaattcgactataaaatgtaccccggtctgaatcacgaaatggacgtctggcgtccggcctatgctgagtttgttcaaaagctcttcagataaacctgtcgccctccctgccgggaggggcggcttaacgcgtaatattccacccgcgcgccttccacagcgcgggtagctgcgccagatcggtgaaggtcgtgacttttggatgaacgatcggcttgttgtgcgggtcggcgcagaagtaaaacacctccatccccgcatcaatccccgactgcgcgcccgcagacgagtcatccaccagaatgcagtgctctacgttaacgttcatcgcctttgccgcatggaacatcagtgccgggtccggcttccagcgctggatatcgtagccgctgaacagtttttccgggaagtggtgcaacatctcaagcttgcccagcgagtgctgcattttgctgaccggaccgttggagaccacgcagatcggcaccgtcatcgcatccagcagcgcgtttgcgcccggaatcacctccagctccgaatcgaacaggcgcgcaacctcggcgcgatacaccggttccagagccgttttatccagaacgacgccgtgttcttcgttaatgatgtcgatgatctcgtagagcttcacgcccttaaagcgtttaaacacctcgtcgagttccagcgtaatgccaaattcctggaacatggcgacatacgcgcgggaacaaatgacctcactgtcgaccagcgtaccgtcgcagtcgaaaaataccgcttcaattccggacatgcctttcccttttaaccagtttaacgtttacgtacggcagttcaccggaacgcaatcgttgccgtataagcaaattcaatgaaaaaagtatcacgtaaccgccactattgtcgcattttggtataggatagcgacgaattttccctccttgttcggaaattgatgatgagtcaacaacacactacccagacatctggtcagggtctgcttgagcgcgtgtttaaactgcgcgagcacggcacgacggcacgcaccgaagtgatcgccggtttcaccaccttcctgacgatggtctatatcgtttttgttaaccctcaaattctgggcgttgctggcatggataccagcgccgtcttcgtgactacctgtctgatcgcggccctcggcagcattctgatgggtgtgttcgctaacctgccggtcgcgctggccccggcgatgggtctgaatgcgttctttgccttcgtggtggttcaggcgatggggctgccgtggcaggtgggtatgggcgccatcttctggggtgcgattggcctgctgctgctgaccattttccgtgtgcgttactggatgattgcgaacattcccgtgagcctgcgcgtgggcattaccagcggtatcggtctgtttatcgggatgatggggctgaaaaacgccggcgtgatcgtggcgaacccggatacgctggtgagcatcggccacctgacctctcataacgtcctgctgggcgtgctgggcttctttatcatcgccatcctggcttcccgcaatattcatgcggcggtgctggtctccatcgtggtgaccacgctgctgggctggatgctgggcgacgttcactataacggcatcgtttccgcgccaccgagcgtctctaccgttgttggccatgttgatctggcgggttccctgaacctgggcctggcgggcgtgattttctccttcatgctggttaacctgttcgactcctccggtacgctgatcggcgtgaccgacaaagcgggtctggcagatgagaaaggcaaattcccgcgcatgaagcaggcgctgtttgttgacagtatctcctctgtgaccggctcatttatcgggacctcgtctgtgaccgcttacatcgaatcctcttccggcgtctccgtgggcggccgtaccggcctgacggcggttgtagtgggtattctgttcctgctggtgatcttcctctctccgctggcgggcatggtgcctccgtacgctgcagcgggtgcgctgatctacgtgggtgtgctgatgacctccagcctgtcgcgcgtgaagtgggatgatttaaccgaagcggtgccggcgtttattaccgccgtgatgatgccgttcagcttctcgattaccgaaggtatcgcgctgggctttatctcttactgcgtaatgaagatcggtaccggccgcttccgcgacctcagcccgtgcgtcatcgttgtggcgctgctgtttgtactgaagattgtgtttattgacgcgcactaaggtgcggtttgtggtgtcaggtggcgcttcgcttacctgacctactgacgagtgtaggcccggtaagcgctagcgccaccgggcttttttatcaggctttaacccgcttaatataatccccgaacgccgtcagctggccagacagatggtcgcgcgtgctctgatccaccacctcacccgtttgcgggtcgaccttgttctgaatcactccgcccataaattccggcttgttcatcaccatcgcatcgaggaagaccaggatctgacgcaggtgatactggcagcgcgcgccgccaatcgcgcccatggagctggtctggatcagcaccggtttgcctgacagcggctgctcaggtaaacgggacagccagtcgatggcattcttcagaccaccgggtacagagtagttgtactctggcgtgacgatgaccacgccgtcagcctggcgaatctgctctgccagcgcctcaacgctctgcgggaacccttcttcctgctgtacgtcagcatcataaagcggaatatcgccaatagacggcagggcgctaatttccatacctgcaggtgccagctgtggcagcgtgcgggctaccatcccgttaaatgaacctttgcgcaggcttcccagtaacgtaacaactttcaacgtatcagacatgattactcctgtttcatcatgatgaccctgattggatcagctaagggtgaatgctttttctgccggtaaactggttaatcgcatcagacgtgcagcgggctcgttggcgcgctcgggcacatcaggaaggctacgccatccctgttgactgtcaaattcccagattttcatgcgttcgatggcgggggtcaccgcgatggaccagatgagcacatcctccgcgtcgcagagcgcttctaccagcgtggcctgggtggcgcgcagacgtccggagcctggcaacagctgcagcaggctggcgtcgtctgaggcgcatccgcagagcttgcgaatgctctggcgcagggtaatgagctgagctctggcttcaacaggatcgttctggttgcgtacccacagcttctcattgctggagagcggatagtcttcatgcgcgttaccaccgtggaagctgcgcgtcgcgcgctgaagctccatatcaagcccacagtccccttcggtggtcagcgcgaccccaatgatattgcccgtgtaggcaatggaaaaacgagggagatccgggtccgcaaagaccgggcggccttctggctgggtaatgatgtccggcagctcgctggtgccgtacagcataaacatcagttctgcgagaagcgctcgggacgctaaaaaccgcgacctgcggtgctccggaagcgtgagtgcttcacggtgacaggctgaagaaattcttgccgatacgagacgtccttctgtaagtatccctcttgcaaagtgcgtagccatttttcgctccttgataatggtcgtaatcggttaaacggttacatgattatcgcttaacttgcctcctgttttaatcagtaaatggaagtaagagaagccttaggaccgaactttacattttcttaggcaaaaattggatcgctcgcaccgtacagcgccttgatggtctcccgcagccagagaattttgggattatggctgttccgtttatgccagatcagcgtgaagggcacggtcaatttatccgcctgctcctcatcaatggggatcggaagcgcgatcagcttacgctggtggagttcattgtagtgatgacagtagtgcggggcggtggcgatatagtgatggccgggctgcgccgccataaacatcgcctgttcgaagcccggcaggctcatggcgatagtgcgatcgcgtcccatctcctttaacacctcatcaagcgcccaggtatcgctgcgttcccagaagatgctgatgtggggatagcgcaggaaggtctccagattccattcttgctgaagcgccggatgatcctcgcgcagatagacgcaggggcggtcgctgaacaggatttcgtagtcgataaaccacggcatcagcttaagcagctcgcgggatcgcggatgcgtttcacgcccggtgaagcccaaatccacctcgccacgcgtaatcgcgtccagcgagtcgtaatcccactggcgcattttcaccgtcgcctgcggatagcgctggttcacctgctccagcagggtattgaagcggatcagcatcagcggcgtttccgcggccagcacgaacgtcagcccgcccggagaatcatgatggaatttatcgaggatctggttgccgatttgcatccagtcagccagatcctgctccaggctcaccgtcagcggcgtcggcagcagccctagcggcgttttgacaaacagcgggtcgtcaaaccagtcacgcagcttggccagtgatttactcaccgccgacggcgtcacgttcatccgcttcgccgctttggtaacgctgcgctcctgcagcaaaagctgcaggcacagcaacaggttaagatcgagactgctgatgggcttcttcatagtgcgccgcgggctggataaccataagtaaggtaatgcagactatgctacagccaatcagaaccccgatcagcatattcagcgcgttaagcccgatgactgccgccagccaaatccacagcgacgagccgcagacctgtgcgatcctcagcaccgagcttgccactcctgcccgcagcgagaagggaccaagcgcctggctcatcgccacgccaaagccaaccgagaacccggcgcaaatgagcgtaatgcccaccagcatcaccgcatgtgagctggcggtcgccaggatcgcgcctgcggcaaggaataaaacctgtgaggtcaacatcagcgtgcgctggcggaagatattcagcgcaaacggggtggagaacgacacagccatactgaccatcgcggttaatgccatcaccgttgaatactcaccgcgatcgaagcccatggtctccatcagcaacaccggggaaacgtttacataggtcaggatcaccgccacgcttagcgtggtcacggtcagacggctgaggaaaaagcggtttagaagcttctctgccgggtgaatggtcgcggtatggccggtattctgcgagcccgggtgggtctctttcagcacggcaatcgacaggacaaacaccagcgcgcccatcgccgccatggtccagaacaggctctgccacgggaacttcagcatgatcagatagcccacgaccggggccagcaccgggatgatgcaggtaatgccgttcagcatcgagagcaccttagcgcgacgctgggcgcttaaggtgtcgcgcaaaatggcaaacgccaccacgtagcaaccgcccgcaccgatgccctggataaagcgcccggtcaggaacacggtgctgttttgcgcctgtgagcagagaagcgacgccagggcaaaaacgatggcaccggcgattgcgacaggctgacggcctgctttatccgcaatcttcccggcaaagaccatcgacgatgccatccccgcgaggtaggccgaaaacgcaatatgcagctgcgcttcgctggcgcccagatcgcgggcgatatgcggtaatcccaccagatacatatcaataccggacggataaagcagaactaatgcgaaactacaaaacagaaaacgcgccataaaccccccatagatgcaggcatgcaggatagggggtgaaaagggattaggcgagttgccatttggacaatggtgatttcccaggaggaaatcaccatggattagcgggaattacttaccaatacagaagctcgagaagatccgtcccagcagatcgtccgacgtaaactccccggtgatctcgctcagattctgctgcgccagacgcagctcttccgccagcagttcacctgcccatgcgccaatcagctgcgctttgccctggtcaagatggcgtgccgcctcttccagcgcctgcaggtgacggcgacgcgccaggaagccgccttccatactggtatcaaagcccatgctctgcttgagatggttacgcaggtcgtccacgccttcaccggtccgcgccgacaggcggatcagtgagtgaccattcacatcgctgataccgagcgtttcgccggtcacgtccgctttgttacgcaccacggtgatcggcagtttggccggcagacgggcaataaagtccggccagatctccgccgggtcaacggcgtcggtggtggtgccgtccaccataaacagcacgcggtcggcctgctcgatctcctgccaggcgcgttcgataccgatgcgctcaacttcgtcgctggcatcgcgcagaccggcggtatcgatgatgtgcagcggcatgccgtcgatgtggatgtgctcgcgcagcacgtcgcgagtggtaccggcaatgtcggttacgattgccgcttcacggcccgccagggcgttcagcaggctcgatttaccggcgttcgggcgtccggcaatcaccaccttcatcccttcacgcagcaggctgccctggcgcgcttcggcgcgaacggcgtcgagatcggccattacctggttgagctgggcttcgattttgccgtcagagaggaagtcgatctcctcgtccgggaagtcgatagccgcttccacgtagatcctaaggtgagtaagtgcttccacaaggtgattcacacgcgcggagaatgccccctgcagcgagttcagagcagagcgggccgcctgttcagaactggcgtcgatcaggtctgcaatggcctccgcctgcgccaggtcgagcttgtcgttgaggaaggcacgttcggagaactcgcccggcttcgcaatgcgcaggcccggcagggtcaggatccgttttaacagcaggtcgaggataaccgggccgccgtggccctgcagctccagcacgtcttcaccggtaaaggagttcgggccggggaaccacagcgcaatgccctggtccagcggcgtgccgtcggtatctttaaacggcaggtaatcagcgtagcgcggctttggcagtttacccagcaccgcttcggccacctcgcgtgccttcaggccggagatacgcagaatgcctacaccaccgcgtcccggtggggttgcctgggcgacgatagtgtcgttatggctcatggttgctctcgttcaatacaaataaaaaaggcggtcaatcgaccgcccttattttagcgttaacttatcggatcaggactttttcttttcgcggctatgcaggccacgtttttccagaccacggtaaatcagctgctgctggatgatggtcaccaggttgctgacgatatagtacagcaccagacctgacggaaaccacaggaagaacacggtgaagatgaccggcataaaggtcatgatcttctgctgcatcgggtcggtcacggtggtcggcgacatcttctggatgaagaacatcgtcacgcccatcaggatcggcaggatgtagtacgggtcctgtgcggacaggtcatggatccagagtgcgaacggcgcgtggcgcagctcaacggaacccatcagcatgtagtacagcgcaaggaagattggcatctgaatcagcagcgggaagcaaccacccagtgggttcactttctctgctttatacagggccatcatttcctggctctgacgctgtttgtcatcgcccagacgctcacgcattgcctgaatcttcggctgcagcatgcgcatcttcgccatggaggtgtactgcgctttagtcagcggatacatgatgccacgaacgatgaaggtgataacgatgatggagaagccccagttacccaggaagctgtggatgaacttcagcagcttaaacagcggctgagagatgaaccacaaccaaccgtaatccacggtcagatccaggtgcggcgcaacagcggccattttgtcctgaatttccgggccaacccacagggtgctggccagcttaccggtttgacccggctgtaccagaaccggctgagatttgtagccgatggctgcaaggccgttacccaggttcgcggtatagaagttgttggtaccgtcgttatttggcacccacgccgtcgcgaaatactgctgcagcatcgccacccaaccgcctttagcgctgacgttcaggttttcgttatcggcaatggtgtcgaatttgtatttctcgtacttcgcgtcaggcgtggagtacgccgcgccacggaaggtgtgcagcgcaaagttgctgcttccggtgtcacggtgagacggcagattgatggactgcttcagctggccaaaggtcgacagctccagcggtttcgcactggcgttctgtacgctgtagcccacgttcaccgcatactcaccgcgcttcagggtgaaggttttggtgaaggtgttgcctgcggcgtcggtataggtcatcgggataacgagttcgttctggccatcagccagcacaaaggtgtcgttctcgacgttatacagtggacgcgcaccgttagccgggttatccgggccatcacgaccggtcaggccgctctgcgcctggtagataaactcaggcgtggtttccagtaactggaacggttcgttagacttcagctctttcgggtaggtcaacagcagcgcctgctcaacatcaccaccacgggtgttgattgtcagctcaagcacatcggtcttaaccgtaatctgtttcccctggccactggccggtacgccctggtcggcggcgctacccgctgcggtggtcgtagtctgcgtggtctgctgctggggttgaggatttttatcctgctcccatgcctgccagatcatgaaagacacgaacaacaaagcgatgataagaagattgcgttgcgaatccatcgttagtgttctctggtatcaaagggtcctggggggacggggtcgtctccaccggggtgtaaagggtggcattttaatacgcgtttcaccgtcaaccaactgccttttatcactccaaacctgcgcaatgcctcaattccgtagcttgagcatgttggtgtgaaacggcagtgcggcccgagtagcggactaatcaggcgttgataaacccgaatgagggctatcaggacccgggagccaggcgacagtggcggcgccataatttttccaacgcttccgagagagcacggttatcgaggtcggcaacccctttcttcgccaccaccacgaaatccattgaaggcagttcgtgctgacgtaaacggaagctttcacgcgtcagacgtttaatccgattgcgttcatgcgcacgcttaacatttttcttggcgactgtgagaccgatgcggggatgccccagcgaattttggcggccgaggatggtgatttgcggcgtgccagcccgttgtggctgctggaagacgaaagtgaaatgagcgggagttaacaaacgtaactccctaggaaatgctagcttaaccactcaggggttagctttattacttggaaacggtcagacgagcgcggcctttagcacgacgacgtgccagaacctgacgaccatttttagtagccatacgagcacggaagccgtgagaacggttgcgcttcagtacagacggttgaaaagtgcgtttcatggcgatttctacctaaacttgaataaattcactgacttttgcgtatacccgaacgagtttcgaacgactaacgcctcagcgtgggtgattaaagaggccggattgtaataattgtacactccggagtcaattctctttccttatttcccgcgtatttccgcacgttttcgcgtggaaaatgagcaacggacgacgcaggaagatgagcatcacgcgccgggtcgaggattatacgggctcaccgataaagcgcaaggatcgtcccggatcttcgttagatcatttaagcaataaattggctgtgctcattaatttttccaatatgcgggctaaatcgtggggcactcgcgccaggatcgtttacacttaaccggtttctgatcttcctgtggataaatcgggaagaatctgtgagaaacagaagatctctggctcagtttaggctatgatccgcggtcccgatcgggatcccaggatcctggtcaggataaattgcagatagcaattcgcacgtccccctttacacagggtcatgccgatgtgcgccaacaatcatgaatattcaatagttttcttttattgttcgagtggagtccgccgtgtcactttcgctttggcagcagtgtcttgcccgattgcaggatgagttaccagccacagaattcagtatgtggatccgcccgttgcaggcggaactgagcgataacacgctggctttgtacgcgccaaaccgttttgtgctcgattgggtaagggacaagtaccttaataacatcaatggactgctgaacgatttctgcgggtcagatgccccacagctgcgctttgaagtgggcacaaagccggtcacccaaaccgtacgtgaaaccgtgaatgtggctgcgcctgctcaggccgcacccgcgccggcccctcgcgtcgctcctgctcgtcagggttgggataatgttcctgcaccggctgagccaacctaccgctctaacgtaaacgtcaaacacacgttcgataacttcgttgaaggtaagtcgaaccagctggcgcgcgcggcggctcgccaggttgctgataaccccggtggggcctacaacccgctgttcctgtatggcggcacgggtctcggtaaaacgcacctgctgcacgcggtgggcaacggcattatggcgcgcaagcccaatgccaaagtggtgtatatgcactccgagcgcttcgttcaggacatggtaaaagccctgcaaaacaatgcgatcgaagagtttaaacgctactaccgttccgttgacgcgctgctgatcgatgacattcagttctttgccaataaagaacgatcgcaggaagaatttttccacaccttcaatgccctgctggaaggcaatcagcagatcattttgacctcggatcgttatccaaaagagatcaacggcgttgaagatcgtctgaaatcccgcttcggctggggcctgaccgtggcgatcgagccaccggagctggaaacccgcgtcgcgatcctgatgaagaaagccgatgaaaacgacattcgcctgccgggtgaagtggcgttcttcattgccaagcgtctgcgctccaacgtgcgtgagctggaaggggcactgaaccgtgttatcgccaatgccaactttaccggtcgtgcgatcaccatcgattttgtgcgtgaagcgctgcgtgatttgctggcattgcaggaaaaactggtcactatcgacaatattcaaaagacggtggctgagtattacaagatcaaagtggcagatttactgtctaaacgtcgttcccgctcggtggcgcgcccgcgtcagatggcgatggcgctggcaaaggagttaaccaaccacagtctgccggaaatcggggatgcgtttggtggccgtgaccatacgaccgtgctgcacgcctgtcgcaagattgagcagttacgcgaagaaagccacgacataaaagaagatttttccaatctaatcagaacattatcatcgtgacgctatgaaatttaccgttgaacgtgaacatttattaaaaccgctgcaacaggtgagtggcccattaggcggccgcccaacgctgcctattctcggaaacctgctgcttcaggtcgcggacggtacgctgtcgctgaccggtacagatctggaaatggaaatgatcgcgcgcgttacgctgacgcagccgcacgacgcgggcgcgaccacggttccggcacgtaaattctttgatatctgccgcgggctgccggaaggcgctgaaatcgccgtgcagctggaaggcgaccgtatgctggtgcgctctggccgcagccgtttctcgctctccacgctgcctgcagcggacttcccgaacctggacgactggcagagcgaagtggaattcaccctgccgcaggcgacgatgaagcgtctgattgaagccacccagttctccatggcgcatcaggacgttcgttactacttaaacggcatgctgttcgaaaccgaaggtgaagagctgcgtaccgtggcgaccgacggccaccgtctggcggtctgttccatgccgattggcgactcactgccaaaccattcggtgatcgtgccgcgtaaaggggtgattgagctgatgcgtatgctcgacggcggcgacacgccgctgcgcgtgcagatcggcagcaataacatccgcgctcacgtgggcgactttgtcttcacatcgaagctggttgacggtcgttttccggattatcgccgcgtattgccgaagaacccggacaaaacgctggaagccggttgcgacagcctcaagcaggcctttgcccgtgcggctattctctctaacgagaaattccgcggcgtgcgcctgtacgtgagtgaaaaccagatcaaaatcaccgccaacaacccggagcaggaagaggcagaagagattctggacgtcacctacgccggggctgagatggaaatcggcttcaacgttagctacgtgctggatgtgctgaacgcgctgaaatgcgagaacgtgcgcatcctgctgaccgactccgtttcgagcgtacagattgaagatgccgcatcacagtcggctgcctatgttgtcatgccaatgagactgtaatgtcgctcacccgtctgttgatccgcgactttcgcaacatcgaaagcgcggatctcgctttatcccctggctttaatttcctggttggcgcgaacggcagcggcaaaaccagcgtgctggaagccatctatacgctcggccacggtcgggcgtttcgcagtttgcagattggtcgcgtgattcgccacgagcaggaatcttttgttctgcacgggcgtttgcagggtgaggagcgggagaccgccatcggcctgaccaaagacaagcagggcgacagcaaggtgcgcatcgacggtaccgacggccacaaggtggccgagctggcactgctgatgccgatgcagctgatcacgcccgaggggtttactttactcaacggcggccccaaatacagaagagcgttcctcgactggggatgctttcacaacgaagccggattctttaacgcctggagcaacctgaagcgtctgctcaagcagcgtaacgccgcgttgcgccaggtgacgcgctacgcccagctgcgtccgtgggacatggagttaatccctcttgcggaacaaatcagcaactggcgtgccgaatacagcgcaggtattgccgaagacatggccgacacctgcaaacagtttttacccgagttctctctcaccttttccttccagcgcggctgggagaaagagacggactatgccgaggtgttagagagaagcttcgagcgcgaccgcatgttgacctacaccgcgcacggcccgcacaaggcggatttccgcattcgtgccgacggtgcgccggtggaagacacgctgtcgcgcgggcagctcaagctcctgatgtgtgcgttgcgcctggcgcagggggagttcctcacccgcgagagcgggcgacgctgcctgtacctgatagatgattttgcctcggaacttgacgacgcgcggcgcgggctgcttgccagccgcttaaaagccacgcagtcgcaggttttcgtcagcgccattagcgctgaacacgttatggacatgtcggacgaaaattcgaagatgtttaccgtggaaaagggtaaaataacggattaacccaagttgaaatgagcgagaaacgttgatgtcgaattcttatgactcctccagtatcaaagtcctgaaagggctggatgcggtgcgtaagcgcccgggtatgtatatcggcgacacggatgacggcaccggtctgcaccacatggtattcgaggtggtagataacgctatcgacgaagcgctcgcgggtcactgtaaagacatcgtggtcaccatccatgcggataactccgtctccgtcaccgatgacggccgtggcatcccaaccggtattcacccggaagagggcgtctccgcggcggaagtgatcatgaccgtcctgcacgcaggcggtaagttcgacgataactcctataaagtttccggcggcctgcacggcgtaggtgtttcggtagtaaacgccctgtcgcagaagctggagctggttatccagcgcgaaggcaaaattcaccgtcagctttacacgcacggcgtgccgcaggcaccgctggccgttactggcgaaaccgacaaaaccggtaccatggtgcgtttctggccgagcctcgaaaccttcaccaacgtcaccgagttcgagtacgacatcctggcgaaacgcctgcgtgaactgtcgttcctgaactccggcgtctcgattcgcctgcgcgacaagcgtgacaacaaagaagaccacttccactacgaaggcggtatcaaggcgtttgttgagtatctgaacaagaacaaaacgcctatccacccgaatatcttctacttctccaccgaaaaagacggtatcggcgtggaagtggcgctgcagtggaacgacggtttccaggaaaacatctactgctttaccaacaacattccacagcgtgacggtggtactcaccttgctggcttccgtgcggcgatgacccgtaccctgaacgcctacatggacaaagaaggctacagcaagaaagcgaaagtcagcgccaccggtgacgatgcccgtgaaggcctgattgccgtggtttccgtgaaggtgccggatccgaagttctcctcacagaccaaagacaagctggtctcttctgaggtgaaatcggcggttgagcagcagatgaacgaactgctgagcgaatacctgctggaaaacccgtctgacgcgaaaatcgtggtgggcaaaattattgatgcggcgcgtgcccgtgaagcggcgcgtaaagcccgtgaaatgacccgtcgtaaaggcgcgctggacttagccggcctgccgggcaagctggctgactgccaggaacgcgacccggcgctgtccgaactgtacctcgtggaaggggactccgcgggcggttctgcgaagcagggccgtaaccgtaagaaccaggcgattctgccgctgaagggtaaaatcctcaacgttgagaaagcccgtttcgacaagatgctctcttctcaggaagtggcgacactcatcaccgcgctgggctgcggcattggccgtgacgagtacaacccggacaaactgcgctaccacagcatcatcatcatgaccgatgcggacgtcgacggctcgcacattcgtacgctgctgttgaccttcttctatcgtcagatgcctgaaatcgttgaacgtggccacgtctacattgcccagccgccgctgtacaaagtgaagaaaggcaagcaggaacagtacatcaaagatgatgaagcgatggatcagtaccaaatcgcgatcgcgcttgatggtgcgaccctgcacgcgaactcgcacgcccctgcactggccggtgaaccgctggagcgtctggtgtccgagttcaacgccacgcagaaaatgattacgcgtatggaacgccgttatccgaaaacgctgctgaaggagctggtttatcagccaaccctgaccgaagccgatctgagcagcgagcagaccgtcacccgctgggtgaacgccctggtgaccgatctgaacgaaaaagagcagcacggcagccagtggaaatgcgatgttcagcagaacgctgacgggcagttcgagccgatcgttcgcgtgcgtacccacggcgtcgacaccgactatccgctggagcacgagtttgtcaccggtccggaataccgtcgtatctgcacgctcggcgagaagctgcgcggcctgatcgaagacgatgcgttcatcgaacgtggcgaacgtcgtcagccggtagccagcttcgagcaggcgctggactggctggtgaaagagtcccgtcgcggcctcgcgatccagcgctataaaggtctgggcgaaatgaacccggagcagctgtgggaaaccaccatggatccggaaagccgtcgcatgctgcgtgttaccgttaaggacgcaattgctgcagaccagctgttcacgaccctgatgggcgatgcggttgaaccacgtcgtgccttcatcgaagagaatgcgctgaaagcggcgaatatcgatatttaatcgacgtgataccgcacgataactggccgcgcgtttagcgcggcttttttatgggcgcgggcatatcctgcgacagcactgacggtaagcgactggcgagcgtatcgacggcaatcctcactctcagcggcaggtgcggcgtctgctgccagaccgcatggacgtcaaaatggacatccggcgcctgcttcaggagcgggacgagctttccctgatgaatttctttaatggccatccagcaggggagccaggcaatcccgtgtccggccagcgccgcgtcgcagatggcctgcaaatcatccatattgagcgatgaacggggagtaaaggtgtgcgaggtcccttcgttatccatcagttgccagggtaacactctgcctgcgcgcagatagttaatggccgtatgatggggtaagtcagccacgctttgcggctggcctttgttctgcagataatccggcgcagcgcacagcaccatgcggtgttcccccagctttctggcgaccagcatgctgctgtcctgcagcgtgccgttacgcactgccatatcaaacccttcctccaccagatccaccacgcgatcgctgaacgacatttcaagctcaagcccgggatgttcctgcgccagttcaatcaacagcggcgcgacgcactggcggccaaacagtaccggcatggcaacgcgcaggcggccgctaacctgctgtttccccgtttcaagcagcgactctgcgccccgaatttcctccagcgcacgcaggcaccgttcataaaaaagggcgccgttatcggtcaggctctggctgcgggtggtgcgctgaaacagccgtacccccagtcgctcctcgagacgagcgatgctttttcctaccgccgagcgtgacaaatgcagacgaatggcggcctgtgcaaagcttcctgcctccacggcagcgacaaaaacagggatatccttcagcgtgtcggtcatgtattgtatcttttttggcgtcaatatagagaaaacttatcgccactggcgaccattcgtcaacggtagactgtcagtactaaagcttacttgatggccggagaaaaaaatgaccgagacaatgcaacgctggacgatgagcgccctcgggcgcgagagcctcacgcttattcaggagcccattccccagccaggtccgggtgaagtgcgcgtaagggtgaatgccgtcgcgctcaactatcgcgacaaaatggtgattgaaggcacgatgccgattccgctttccttcccgtttaccccggcgtctgacatggcgggcgtcgtagacagcattggtgaaggcgtcacgcgtttccagcccggcgcccgcgtcatctcaaccttctttccggagtggatcgacggtaagccgcaggcggacgcgcgcaatttgccctataaaacgtccggcggctatttccagggaatgctggccgagtacgtgattgtgaaggaagacgcgctggcggcatcgccggaaagcctggatgacgcagaggccagcaccttaccctgcgcggggcttaccgcctggttcgcactggtggaacgcggtcagctgcgcgccgggcaatcggtgctggtacagggaacgggcggcgtggcgattttcgccctgcaaatcgcaaaagcgcacggcgcagaggtcattgttacgtccgggagcgatgaaaagctggcgctggccaaaaagctgggggccagccagggcatcaaccgcctgaaaggcgactgggctgaagaggcgctggcgctgacgcaggatcgcggcatcgaccatattattgaaaccgtggggggcgagaacctgaagcactccctgcgcgccgttgctgttcatggacgtatctcggtcattggcgtgctggccgggtctgacatttcgctctctgctggcgaactgttgctgaaatctcccgtcattcaggggatcggcgtggggcaccgccgggcgctggaggatttcgtccgcgctgttgatgtcaccggcctgaaacccgtgattgagcatcgctaccgttttaacgagcttgaacaggcacttgagcatctggatcgcggtgcgtttggtaaaatcgttctcactcgcgagtaggtctttgttcctcgggataggcgtaaaagggggcttttgttgcgcaaggtagctctatttttgtgtgcttaatcgcgttagcatgaggcagcactcatttatcccggggaactcatggctatcaaacttattgcaatcgatatggacggcacgctgttgctgccagaccacactatctctccagccgttaagaacgcgatcgccgcggcacgcgcaaagggcgtgaatgtggtcctcaccacggggcgtccgtatgcgggcgtgcacagctacctgaaagagctgcacatgaatcagcccggcgactactgcatcacctataacggcgcgctggtgcagaaagccgcggatggcagtacggttgcgcaaaccgcgctaagctacgatgactaccggttcctggaaaaactgtcccgtgacgtgggttcccacttccacgctctcgatcgcaatacgctttacaccgccaaccgtgatatcagctactatacggtacatgaatcctacgtggcgaccattccgctggtgttctgtgaagccgagaagatggatccggccacccagttcctgaaagtgatgatgatcgacgagccggagatcctggataaagcgattgcgcgcattccggccgaagtgaaagagaaatacaccgtgctgaaaagtgcgccgtacttccttgaaatcctcgataaacgcgtcaataaaggcactggcgtgaaatcgctggccgacgcgctgggcatcaagccggacgaaatcatggcgctgggcgatcaggaaaacgacatcgcgatgattgaattcgcgggcatgggcgtagcgatggataacgctattccgtcggtgaaagaagtggctaattttgtcaccaaatccaacctcgaagacggcgtggcttacgccattgagaagtttgtgctgaactaaacacccgcttgcgataccctgatgcgaaaaccgcgcatcagggtatcctcatgaaacaaattaccttcgcttcccgcaaccaccagcttactaacatcaatacctggacgccggacagccagtggctggtctatgacgtgcgcccgtcaggtgcatcgttcaccggtgaaaccatcgagcgggttaatgttgttacgggcgaggtcgaggtgatttatcgcgccactgacggcgcgcacgttggcgtggtgaccgttcatcccgcgcaggagaaatacgtctttatccacggcccgaaaaacccggatgcggactggcactacgattttcatcatcgccagggggtaattgcgcatcacggtcaggcgagcaacctggacgcaatggatatcacttcgccgtacactcctggcgcgctgcgcggcggcagccacgtccatgtcttcagcccgaacggccagcttgtcagctttacctataacgatcacgtgctgcacgtgcgcgatgcgaagcttgatttacgcaacgtcggcgtggcggcaccttatggcccggtgaatccgccgggaaaccatcctcgtgaatacccggggacttactggagcgtgctggtcagccgcacgacgcccaacccgcagccgggcagcgacgaaattaaccgcgcctacgaagagggctgggtgggcaacgacagactggcgtttatcggcgataccctgtctgcaacgggcgagaaagtgcctgaactgtttattgttaacctgccagaagatgaacagagctggaaaagggcgggcgatgcgccgcttcagggcaccgcagagaccctgccggccccgccagctggggtgaagcagcgtcgtttgacctttacgcatcaaagggcctatccgggcctggtgaacgtgccgcgtcactgggttcgcagcaacccggagggggcacagatcgcgtttctgatgcgcgacgataacggcattgtgcagctgtggctgatctcacctgaaggcggcgagccgcgccagctgacgcgtaacgggagcgatattcagtctgcgtttaactggcatccggcgggtgatcggctggggtttgtgctcgaaaaccggatcgcctgctgtgacgcgcagaccggacaagtgacgtttttgacgtccgatcacggcaatccgccgtctgcggatgccgtcgtattttccccggacgggcgctttattgcgtggatggaagagacggacggtttccgtcagctctggttagcggaaaccgcgcagaactagcgtggcggcatctctgcgggcggaatgacggcgtttgtcgccagattttcctgctcgcttttctctacccgtgagcgcacggagtcgtccttacggaataaatcccacggcagcagaagcgtgtccgccacagccgtaaacggcatatccaggataaccagggatttggtgccccagtttgtatcgtcatcggagatcatcgccgcgctggcgcgcgtccccggatatgttccttctttaccgccggtgtgagacatcacgctcgaacacccgcaaagtaaaactaccccgctgaacgtcgtcagctttatcagaacatttttcatcatcactcagtcatcgttaatggcactgcatagacctgcaactcagggttatagcgagccttatccaaaatggatagcccgataaccccgcactgtggcagccatcgcaatttaaccctttgtgctgttgtcccagtctatgcgagatgcaggaaagtgcaaaaaaaagtgcagttgtcatgcttgaaaagcccggttgcagacccattttaagaatacgacccgataacgaactcgcctgatgggtgttcggggggcgtaaaggcctgtccatggtggaaggcttaattttctcgctgatttcaggagttttatttatgcgtaacttcgatctttctccgctataccgttctgcaattggttttgaccgcctgtttaaccatttagaaaataaccaaagccagagcaacggctaccctccatacaatgttgagctggttgacgaaaaccactaccgcatcgccattgccgtcgccggttttgcagaaaacgaactggagatcaccgcccaggacaacctgctggtggtgaaaggttcccatacggccgagcagaaagaacgtacctacctttaccagggcatcgctgagcgcaactttgaacgcaagttccagttagccgagaacattcacgtgaaaggcgcgaacctggtcaacggcctgctgtttatcgaactggaacgtgtgattccggaagagaaaaaaccgcgtcgtatcgaaattaactaattatgcgggtcgcgcgagcggcccacccagacctgcttgccgtaacgggagcatatgcgaatccatcaggatttgcaggaacaactgcgcacaaaattaaactgtgccgaactcgcttctcagaaggagatttagtatgcgtaactacgatttatcccccttacttcgtcagtggattggttttgacaaactggctaatgccctgcaaaacaccgctgagcaacagacgtttccgccgtacaacatcgaaaaaagcgacgataaccactatcgcatcaccctggcgctggccggcttccgtcaggaggatctggatattcagctcgaaggcacgcgtctgaccgtgaaaggtacgccggagaaacaagagaccgagaccaaatggcttcatcaggggctggttaatcagccgtttagcctgagctttaccctggcagaccatatggacgtctccggcgcaacgtttaccaacgggctgctgcatattgacctgacccgtaacgtaccggaagccatcgcgccgcagcgtatcgccattagcgaccggccggcgttgaatagttaacaagcccgccgaacttgtaggtcgggtaaggcgcagccgccacccgacactgctcacagaccgcacaaggccctgccccggcagggcttttttgtgcgccatcgcccatacaaccgcccacggctctgagagaatccttagcataactaaggttatgccaaggaagtggatcatgagtgatatcgcgttaaccgtcagcgtgttggccctggtcgctgttgttggcctgtggatagggaatatcaaaatccgcggcgtcgggtttgggataggcggggtgctgtttggcggcatttttgtcggccactttgccgaccagctcgggctggtgctgagcgccgaaatgctccactttacccaggagttcggcctgatcctgttcgtttataccatcgggattcaggtgggaccgggttttttcgcctctcttcgtgtctccggattgcggctcaacctgtttgctctcggcattgtggtgatgggcgggctggtcaccgccattctgcataaaatctttgctatcccgctgcccgtggtgctgggcattttctccggggcggtcaccaacacgcctgcgctcggcgcggggcagcaaatcctgcgcgatttgggcatcgaacccggcatcgtcgaccagatggggatgagctacgccatggcctatccgtttggtatttgcggcattctgctctccatgtggctggtccgcgtcctgtttcgcattaacgtcgataaagaggcgaaggaccacgaaaccacgctcaccaacggccatatgccgatcaaaaccatcaacattcgggtcgataaccccaacctgaacaatatggcgattcaggacgtgccgatcctgaacagcgccaatattatctgctcccgccttaagcgcgacgatatgctgatggtgcctgcccccggcaccattattcagcaaggcgatctgctgcacctggtgggccagcccggcgatttgaacaatgcccgtctggtgattggtcaggaagtggatacctcgctctccacgcgcggcaccgatatgcgggtggaacgcgttgtggtgactaacgagcacgtccttggcaaaaaaatacgcgatctgcaggtaaaagagcgttatgacgtcgtgatctcccgccttaaccgtgcgggtgtcgagctggtcgccagcccggaggccagcctgcagttcggggatatcctcaacctggttgggcgcccgtcttccatcgacgccgtcgcggatatggtgggtaacgcccagcagaaactgcagcaggtgcagatgctaccggtattcatcggtatcgggctcggcgtgctgctcggctccatcccgctgtacgtgccgggcttcccggtggcgctcaagctgggcctggcgggcgggccgctgattatggcgctgatcctcgggcgtatcggctgcatcggtaagctctactggtttatgccgccaagcgctaacctggcgctgcgcgagctgggcatcgtgctgttcctggcggtggtcgggctgaagtccggcggggatttcgtcgacaccctggtcaagggtgaagggatgagctgggtcggctacggcatctttatcacggcgatcccgctgctgacggtgggcatactggcgcggatgttcgccaaaatgaactacctgacgctgtgcggcatgctggcgggctccatgaccgatccgcccgcgctggcctttgccaacaacctgcacagcaccagcggcgcggccgcgctctcctatgccaccgtctacccgctggtgatgttcctgcgcatcatcaccccgcagctactggcggtgctgttctgggggatgagctagtaaatcttccgggtggatgcgccgcagatggtagtccacctggtaatcactggtatttcggaacatcacggaatagttgaggaactcgccgctgtcgctgtaggaaagggaggtgatacgcaacagcggcgtctgttccggcaggttcatataacccgccagctgcttatcggccagcaccggcgtcagactctcgtagttgccgctgatggtgatcccgcactccttctcgatgtaatcaaactttgacccttcaagatgcgccagcgacagattgcgaaacagcttcaccggcataaagctgtcctccagcatcagcggctttccgtccacgtagcgcacccgccgggaaaagtagatccgctcatccacctgtatccgcagctggctggcgatggcgggcggggcgggcatcacttcgaactgtaagaccttgctctgcacctcttttccctgctgacgcagcacctccaccagcccggtcaggttggtggtttcgtggtgaacgtctttgcgtgacacaaacgtgccgctgccgtgccgccgttcaaccagcccccagctcaccagcagatccagcgccttgcggatggtcattcgcgccacgccgaactcctgcgccagcgctttctcgcccggcagcggactgccgatgttgtagtccgatgaattcagccgcagccgcaatctgtcagcaatggatttgtagatcaccagtagacctctctgcccttatcagggcgtggatggcgtcctgacatgtccatatttaccgtaaaaagtagacctgattggtcaaaataaaaccatgaatgcgatcacgaatcgcagcggcacgccatgttcacgcatcagtaagttcttatgctcacctcaggccagcaaaaaaccataaaggcctctacccctacaggttgtttcatgaggatttaaaaatgctcagtcaaatacaacgttttggcggtgccatgtttaccccggtgttgctgtttccgttcgccgggatcgtggtgggaatcgccatcatgcttcgcaacccgctgtttgtcggcgaagccttaacggcccccgatcatcttttcgcgcagattgttcacatcattgaagagggcggctgggcggtgttccgcaatatgccgctgatttttgccgtcggcctgccgattggcctggcgaagcaggcccagggccgcgcctgcctggcagtgctgattagcttcctgacctggaactacttcatcaacgcgatggggatgacctggggccacttctttggcgtcgacttctccgccgaaccaacggccggtagcgggctggcgatgattgctggcatcaaaacgctcgataccagcatcatcggtgccatcgtgatttcaggcatcgtcaccgccatccacaaccgctattttgacaagccgctgccggtgtttctggggattttccagggcagctcgtttgtcgttatcctcgcgttcttcgtcatgatcccctgcgcctggctgacgctgctgggctggccgaaagtgcagatgggcattgagtccctgcaggcgttcctgcgttctgccggtgcgctgggcgtatgggtctataccttcctggaacgcattctgatcccaaccggattgcaccacttcgtctacggtccgttcatctttggcccggcggcggtggaagggggaattcaggtctactgggcgcagcacctgcaggaattcagccagagcaccctgccgctgaaaaccctcttcccggagggcgggttcgcgctgcacggcaactccaaagtgtttggctcggtcgggattgcgctggcgatctggtacaccgcgtcgccggaaaaccgcgtcaaggtcgcggggctgctggtcccggccacgcttaccgcggtgctggtgggtattaccgaaccgctcgaatttaccttcctgtttatctcgccgctgctgtttgccgttcacgccgtgctggcggccaccatggcaacggtgatgtacaccttcggcgtggtcgggaacatgggcggcggcctgctggaccagttcctgccgcaaaactggatcccgatgttccacaaccacgccgcgacggtgttcacccagatcggcattggcgtctgctttaccggagtttacttcgtggtcttcaaaacgctgattgcgcgtctgaacctgaaaaccccgggccgggaagagagcgaaatcaagctctacagcaaggccgactataaggcggcgcgcgggcaaaccaccgccccggcagtggccagccagcaggtcgggcaggcagccgggttcctgcaggcgctgggcggcgcggccaacatcgacagcatcaacaactgcgccacccgcctgcgcatcgccctggtcgatatggcgaaaacgcaaagcgatgacgtcttcaaagccctcggcgcccacggcgtggtgcgacgcggcaacggcattcaggtgattgtcggtctgcacgttcctcaggtgcgcgaccagctggaatcgctgatgaaaacccccttaacgaatgaacaaaccaccctgacagaggctatatcatgaaaaaattctcagttgtcattgcaggcggcggcagcaccttcacgcctggtatcgtcctgatgctgttagccaaccgtgaccgtttcccgctgcgcgccctgaagttctatgacaacgacggcgcgcgtcaggaaaccatcgccgaagcgtgcaaaatcatccttaaggagcaggccccggagattgaattcagctacaccaccgatccgaaagcggcctttagcgatgtcgatttcgtgatggcgcatatccgcgtgggcaaatacccgatgcgtgaaaaggatgaaaaaatcccgctgcgccacggcgtgctgggccaggaaacctgcggcccgggcgggatcgcctacggcatgcgctctatcggcggcgtgctggagctggtggattacatggagcagtactccccgaacgcgtggatgctgaactactccaacccggcggcgattgttgcggaggccacgcgccgcctgcgtccgaacgccaaaattctcaacatctgcgatatgccgatcggtattgaagggcgcatggcgcagattgtcggcctgaaggaccgcaaagagatgcgcgtgcgctactatggcctgaaccacttcggctggtggacgtcgattgaagatctcaacggcaacgatctgatgccgaaactgcgcgaatacgtggcgaaacacggctatgtaccgccgtctgacgatgcgcacaccgaggcgagctggaacgatacgttcgcgaaagcaaaagacgtgcaggcgctggatcccgacaccatgccgaacacctacctgaagtattatctgttcccggactacgtggtcgcgcattccaacccggaacgcacccgcgccaatgaggtcatggatcaccgtgagaagcacgtgttcagttcctgccgggcgattattgaggcgggcaaatcctccgccggcgagctggaaatcgacgaacatgcgtcgtacatcgtcgatctggcaaccgcgattgcctttaatacccaggaacgcatgctgctgattgtgcctaacaacggggctatccataattttgatgccgacgcgatggtggagatcccgtgcctggtgggtcataacggaccggagccgctcacggtgggcgatattccgcacttccagaaagggttgatgagtcagcaggtggcggtggaaaaactggtggtggatgcctgggagcagcgctcgtaccagaaactctggcaggcgattaccctgtcgaaaaccgtgccgagcgcctccgtcgcgaaagcgattctggatgacctgatcgaggccaacaaggattactggccagcgctgcactgatcgtcctgaccggcatcgcccgatgccggtctccttgtccttgttgatttacgctatgctgaagcctgcctgtagctcgacaaggaaccttcatgaaaatttcccgcctcggcgaagcgccggactaccgcttctcgctggctaatgaacgcacgtatttagcgtggatccgcaccgcgctggggttccttgccgccggggtggggctcgaccagctcgcgcctgatttcgccacgccgctgattcgcgaggtgctggcgctgctgctgtgcctgttcgcgggcgtgctggcgatttacggctacctgcgctggctgcgcaatgagaaggcgatgcgtctgaagcaggatctgccctatacgcgcgggttactcatcatcagcgcgattttgctggcggtggcgggcgtggtgatggtgctggtgttctatggcggatagccgcaaagcgcgacgcgaagcggaccccggtctgcagccggagcggacgtcactcgcctggctgcgcacgctgctggggtatggcgcgctgatcgccctggcgattaagcacaactggcaccgcaccggggtgccgttctggatctcgcttgttgtgctggcgctggtggcaatcgttttatggcgctatacccgcagccgtaacctgatggacgtagcgcaggacgactttgtgcagccgaaggcggtgcgggataagttcctcatcgccctggccgtgctgtcgctgtctttactcttcgcagtgactcacattcagcaaattgtgagcttttaaagcccggtggcggctacgccttaccgggcctacaactgccgcgaaccgtaggccgggtaaggcgcagccgccacccggcagaattactgccctttagccagatacttcgccatctcgtcttccggcaccatgccgccgccggtcgcccacaccaggtgggtaacgctggcatctgaaggcacgcgcagcggtccggccatgcccgccagcgcggacggttccagacgaatgccttcctcctgcgccagccagccgagcatatcgtacatgctctggtcggaaagcgtataaaacccgtcgagcaggcgctccatcgcgcggcccacgaagccggacgcgcgtcctaccgccagaccgtccgccgccgtcacgttatcaatgcccagatcctgcaccgcgatttcatcgtgcaggccggtgtaaacgcccagcagcatgcacggggagtgcgtgggctccgcgaagaagcagtgaacgttatcgccaaaggccagcttcaggccaaacgccacgccgccgggaccaccgccgacgccgcacggcaggtagacgcacagaggatgatcggcatccaccacgcggccctgaacggcaaactgtgctttcaggcgctcgcccgctaccgcgtagcccaggaacagggtgcgggagttttcatcgtcaatgaagaaacagttcggatcgctttctgccgctttgcgtccctgctccaccgccacgccgtaatcctgctcatattccacgacgatgacgccgtggctgcgcagtttggctttcttccactcgcgggcatcggcggacatatgcaccgtcaccttaaagccgatgcgggcgctcatgataccgatggacatccccaggttgccggttgagcctaccgcaatgctgtactggctgaagaagtccttaaagcgcggctccagcaggatgctgtagtcgtcttcaacgctcagcaacccggcgtccagcgccagtttttccgcgtgggtcagcacctcatagataccgccgcgcgctttaatcgagccggagatcggcaaatggctgtcttttttcagcagcagcgtgccgggaatggatttgccagattctttctccagccgcgcctgcattgccggaatggcgaccagttcggattcaataatcccgcccgttgcggccgtttccgggaaggctttcgccagatacggcgcgaagcgtttcaggcgcgcatgggcatcgtccacgtcggctttggtcagcccgacatacggcaacccttcggcaagcgtcgtggtgcgcgggtttagccaggtggtttctttcagggcaatcagatcctcaaccagaggaaactgtgcggttaaagtggtgatagttgcgttttccataatacgtctcttcgcgctcagataatgaaagaaagcaggaatgtgccgccaagtgcaagcaccgaggcgataaacgtcgccgtcgtatagtatttgaaggtctcattcagggtcgcgccgcagtattgcttcaccagccagaagagagaatcggtcacgatcgtgcagccaatggcgccggaaccgatggcaatggtgatgatctccggactgacgttcgggtagagcggcagcatcggcgcgacgatggccgtggcgcccatcatcgcgaccgtggcggagcctacggcggcatgcagcaccagcgccaccagccaggcgagcaggatagggtgcatgtgcaggttcgagagaatttgcgccagcgagtccgccagaccgctggttttcaggatggcgttgaacgcgccgcccgcgccgataatcagcaaaatgttggcgatagagccaaagccgtgctccgtatgggtcagcattgcgcccatgcccatatgctggcggatgcccagcaggtagtaggcgacaaacacggcgataaacatcgcggtgatcgggttgccgataaactccagcagcgtatacagcgtgccgtcttttgacatattcagttcggcgatggtcttcaccagcatcagggcaatcggcaacagcaccgtaaacagcgtggcgcccagcgacggcagggtatgctcctcccgcaccttcaggtctgaaaattccgccggaaccggtttaaacggcagacgattgtcgagcagcttcaggaacagcgggccgccgaccagagaggccattaggcccaccagcaggccgtagacgattaccgtcccaacgtccgcccctaatttattggtcacaaacagcgcggccggatgcggcggcaccacgcagtgcaccgccatcagcgcggtacaaagcggaatggccagcttaagcagcgacgtgtgggtctttttggcgatggaaaacgccagtgggatcagcaggaccacgcccacttccacgaacagcgtaatgccgcagatcaggcccaccagcaccataatcacgtctgctgacagccagcggcagcgctgcagggcgatcccgatgcgctctgccgcgccggaaacctccatcatcttgccgagaatggtgccaagaccaatcactgccgccaggaagcccagcgtgccgccaatcccgctctcaatggcgtttaccatatccagcgggctcatccccatcatcgcgccgacgaaaaagctcgccagcagcagcgcgaggaacgggtgaaacttcagcttaacgatggttaaaacaatcaacacaatgctgaccagcagcgttgccacaacccagacctgagatcccatatctcacctcacccttatgtcatctgggggtattggacaaaaaagcggcgtgggctgacaaacgatataaattggcgttcaggtgagccagattgaatcaactgagtgactgcgctctaaaaaacgcacttaatccgcattaggttcacataaattcacccatgaacggtatgctgagcgcagaaaccacgcgtgagaattgtgatgaccgatgcaaatgaagccagaaaccggctgctcaacggctggcagctgtcgaaaatgtacacctttgaagtggcggcccggcatgaatccttcgcgctggcggcggaggagctgtcgctcagccccagcgcggtgagccaccgcatcaacctgctcgaagaagagctcggtattcagctgtttgtccgttcgcaccgtaaagtcgagctgacgcaggagggaaagcgcgtttactggacgctaaaatcgtccctcgacaccctgaatcaggagatcctggacatcaaaaaccaggcgctgtccggcacgctgacggtctactcccggccgtcgatcgctcagtgctggctggtacccatgctgggtgactttacccgccgctatccgtcgatttcgctcaccgtcctgaccggcaatgattacgtcaatatgcagcgaacgggcgtcgatctggcgctctatttcgacgatacgccgccaaaccatctgtctcatcacttcctgatggacgaagagattttgcccgtctgctcgccgcagtatgcccgcgagcatgagctgctgaaaaaccccgataaccttagccactgcacgctgctgcatgaccgtcaggcctggagtaatgattccggtacggatgagtggctgagctgggcgcagcactttgcggtaaatatgccgccatcgtcgggcattggtttcgatcgttccgacttagcgattattgcggccatcaaccacgtcggcgtcgcgatgggcagaaagcggctggtgcaaaaacggcttgaacggggcgaactgatcgccccgtttggtgacaagaccctgaaatgccatcagcactactatgtctcgacgctttcgggccgacagtggccgaaaatagacgcctttatcggctggctgagagaactggcaggttgaagaattattacgctttcgcgctacaccaaatgtgaaaaagcgtgctaaatacaggtaatgctttcgatttatccagggtaaaccgtgttaaggcctcttatagcgaccgcgttactgatctcttccggctgggccattgccgctgagccgccgctgacggctgcccgttatgcgcagcagcttggcgtcgggatggatgtggactgggcgcgcaccgagcgcggcatacgcgaattcgacccgctggtggtccgcgattttcgggctaaaggcattacccacgtgcgcatccgcgtcgccgatgagccgacggaagcgcggctgatccacctgcgcaagctggtagaagcctgtgagcagtatggcgtgatcccgatagtcgcttatcaggctgatgaatataaaaacgacccgaaagccgataacgagaaagagacggtcaactggtggattgccgtggcgcactatttcggtcaaagctacccgctgctgggttttgatctcatttatgagcctgccgacaagcttaaccacaatctggcgtcgctaaaccgcgtctatgaaaaaaccgttaaagcgatccacgacatcgacccgcagcgcatgatcttcattgcgccacgcctgcgtgccgcgccggaggagttatccagcctgaagctgcccgcgcacagccaaaactatctgctggcggagtggcatattttcccgtgggggccgctgaagaatggcggtaaatacccgtggacgtccggcacggcggcggagaaagcggcaatccgtaaccgcatcaatgccgcgctgcactggcagcaaaaaaccgggcacgttagctgggttgggggctggggcgtgggagaatcaagccgctttacgccaaccgcctcgcagatagcgttcgctacctttatggcctgcgagctgcaaaaggcgaaaatcccgtatgcgcttaacgcggatttccagttttacgacggggaagagggcgcctggcggcctgcgccagagccgttattgcaggcgatgatcgcccctgtctgtgaaaagcccggcgagaagccgggccatcatgcggttaaaccggctgctcgtgatgcgggacacgcgacgccagcggcagccagcacagtaaaatcagcagccccatcagcgtcatcagcaggcccaaactagcctgcccggtctgcggcatcatcgccgagagccaggccagcgcgccggaaccgatgttctgcaaaccgcccaccagcgcgcccgccgtacctgcaaggaacgggaacggctccatcgcgccgctggtggcgagcgggaacagcatccccgcgccgaagaagaacagcgccgccgggatgagcagcgtccagacggtcatcacgccaaacagccccgggatccacatcatcagacccgccagcagacagctgatcaccgactgccacatcagggtggagaagcgcttgtttggtcgtccggcaaaccacgcgccgaagaacgccgccgggatcggcagaataaacagaatgctcaccaccatgctgctcaggcccagccccgcgcccagcagcacgccggagcaggcttcgaacaccgcgatgcccgccaggccgccgatgagcatcagcaggtagcaggtgaacgcgccgttgccgaacagcgttttatagctggcgatcagcttcgtgcgcggcgcgtcctgcgggcgcgtttccggcatccagcgcgccatgctgaaggtgacaatgatgcacagcaccagcaggaaggcgtagcaggcgcgccaggaccacatcgtgtccagcaggccgccgatcagcggggccagcagcgggctgaccagaatgcccatattcaacaggctgttagcatgacggagctgggtaccctgatacatatcgcgcggtaaggttcgcgccatcaccccgccgacgccggtcccaacgccctgcagggcgctggcggcaatcagtacggtcaggctatgggtggtaatgtcaattaccgtcgccaccatgaaaatactcatgcccatcaggatcaccgggcgacgcccgacgcggtcggagagcgggccgtagaagagctgcgaaacgccataggtcagcaggtaggccgccattacgctctgtaccgcgccctcgcggacgttcaattcctttgccatgtcggcaatcgccggaatgtagatggtttgcgccatctgaccgacggccaccagtaacaccagcatcaacaataagttaacgttccgttgctttttcatgtcgctgaatacttttgccaaaagagaaaaatgaagaataagtgactgcgcattcccataaatgcgcgaggaatctaccacagagagatgacaatttaagcattgtcgcggtgaatgaaaaaaccggtaaaggcaggatttgtaaacaagaacggcaactaatgttgccagtgctttacgccaggcgcagcagaatggcgccgccggcaatgcccagcgccgccgcgatgcgcaggcccgcaaccttctcttttaaaagcaaaaaagcgatcagcgcgccaaagagtatggaggtttcacgcagcgccgcgaccaccgccagcggcgcctgcgtcatcgcccacagcgccagaccgtaagagcccatggtccccaccccgccaagcagcccctttttccagtgcagacgcaggtagccggacgcctcgcgccgacgcgcgaccatcgcccagccgagcaggcagaagccgttcataaagaaggtccacagcgtatagcccagcgcggtgtccgacagccgcacgccggtgccgtccaccagcgtatacccggcgataaagcaggcattcagcagcgccagccagatccccttgcgtgactgcatgtgcccgttcatcgccatcgccagaatagacaggcaaattaccccgataccggcccaggcgagccaggagagacgatcgccaagcgccagcacgctgatcagcgccaccagcagcggggcggtgccgcgcatcagcgggtaggtctggctcatatcggaaacctgataggtcttcgcgaccagcacggtgtacaccacctgtaaggcacaggagacaatcaaaaacggccagcttgcggcagagggctggggagagaaggggagcagcaccagagcaatcagcgtggcggacccgctgacgctaatcgcggaatagagcttgtccgttccggctttgacgatggcgttccagctggcatgcagcagggcggcaaacagcaaaatacagaatacggtgatggtcatggcgtgtcgggtggtgaattgtcactcaactgtaacattcacgtcctgaagctgccagccggttacaccgcacaaaaaaggcggtgcgtcacccgcggttcgtccgagaccagcgtaaaccctgcctggcgataaaatccgtaggcagcgtccggcgcatgggtattgaggaaatcgaaccagatgctggcatctgccatcaccacggtcaaaagctgcttgccaattcccagcccgcgacacttctcgctgacgtagagatggcgaatacgcccggcgcgcggctgctggctgaacggatcgcgattcagaccgcacacgccaaccagcttgccgttgagaaacgcccccagcagcttttcacccggcgcgttaaagcggttctcaccccgctgccagctctcttccagcctgcgtagcatgttgaaattcagtgcgatactctccgccttcagggcgatataccccggctcgtcgggcgtgacaggctcaattaacagacgcgacatagcattccctcgttattaaagaggggcggttgcccgcccctctcaggtgcgacttgaacctgaattaccgaacgaatttcaggacagcatcaagcagttgcagtacagcaacaatgagtttgaggataagtatcaccatatccactacgctcatacgcgtctccttttggttaaaaggagcacgatgctggcgtacctttccgccgcctgttgccagcacctggattgacgtaacacagtgtgctcacttcaggggttaaggcactgacggcaccacccgtttcagccaggacttcgttgcgccggtagaactgcggccccctcgctcactgcgaacaccctcagtatagataaatactgtacgtatgaacagtattttgtggacaaaatctggaaggcgatccatactcaaaaacgtcaaaatccgtgccggaattgcgcgttcgtcttcgatcgcgtatactttttgcgttgacgtaacacagtgtgttctgcggcgaccaaccgcaaaaccctgataaaacctcgcttaggcggggttttttgttttctgggctatccctttttaaggagaagaacctgataaattttgcacgataacatcaccaaatacgaaaataatataaatgagttgtattgatacccatcataaaatttaagttgaattatttattgccgtaataaataacggtgaaagcatttatttataacatgaatatatatttaaattactctattggtttgaattgcgcagccttgcaatgtacattgctataaccacaaaaacgatatggataaattatgcaggccgctgattatttaaagatgaagttccagagcgacagacagttggctatttatggacagcaaggcgttgccgggacatggaaagcattaaagggaatcggctctgatatctattcaggaatggagcgtgtaagctggtactcatcatgcttaatccccagctatcacgatgtatgtgatgaacttctctcagaagaaaagaggatgtacctctcaattgtgtctctttaccgttatcgcgatgtaatagcacagatgctctatctttattttaaaagtgttctaaatgactctgaaaatggaaatgaacaaaatcgcgcccgcaagacgggttcacaggtaaccggacttgttaaaaatatcccgacaagcaaagcagcgcgtttagcaatagcatgggggttggcaatatatctctccaaatctggcctgctctcagaaatcgtcgtcgaacggcttgcacgtcgtgtaccgaacgttgtcatggcatttcaactcattggcacggaccagaagtgcgcgcttgctgctcgtcgcctgaaaacgttggacccaaagtattacgccaccctctatgccgcacaactggagatgctctattactttattgaaccattcctgtctgaactgattaagaaagttcaaatgggattctacagggattttgaagcgatttatgacgacttaagggacaagtagcatgtttaagagtctgctatcaattctctttactgatattttatttcccgtttatgtttttgtatgcgcctctttgtttctgtggttggtgcctgactactgggtattactcacatttattgctatcggtgtatttatcattgttcatccaataattttcggtcgctttgataagtacgattgagttttaaaaaagggattctttatgtcaaatccggcttatttatttcttacagatgaaaatggtttccccatgattggcccctgccttgtgacagggcgtgaaggttcaattgaactcaaatcgttcactcataatgtcaacatcccagtcgacgggaataccgggaaattgacgggcacgcgcatacacatgcccatcatgttccagaaagaatttgatcgtgtaaccccgcttctctttcgtgcgctgagtacgggaagaacactccagtcagccatcattaagatgtatcagattaatgaggcgggtttagaacaggaatattttaatatcctcctggagaatgtgaaaataacctcaatcacacctgacctgtatcccggcgcaaacacgggaacacaccttgaaacggttctcatacgctatgagaaaatcacctggaagcattgcgacggcaatgtcatctatagtgacgcctggaatgagcgggcaacgtactgaaacgtgatccctgacgcatttttgcgcagatgaaaatatttccattgtcacgcccgaaaacctgtgtttgtataaattccatcaatgattccaaacacaggtccccaatgacttcatccatcttcacttcgaccctactaaaaactgcgcaaccagccgcagtggtcgtcgtgcgtgtggtggtggtcgtcggcaatgcgccgtagggactggatcaacacacgaatccaaaaccccgccggcgcaaaccgggcggggtttttcgtttaggaccctccccggaaagtcggctcagaagaaaaggactggagcatggcaagttcgggcacaacatccaccaagacgcgttttaccggcgcgcagctgatcgttcatctgctggagcgacagggcatcaccacggttgcgggcatccccggcggcacggtgctgccgctgtacgatgcgttaagccaaagcacgcagatccgccacgtgctggcgcgccacgagcagggggcggggttcatcgctcagggcatggcgcgcacgcagggtaaaccggcggtctgtatggcctgcagcgggccgggcgcaaccaacctggtcaccgccatcgccgacgcgcgcctcgactccattccgctgatctgcattaccggccaggtgccgtcctcgatgatcggtaccgatgcattccaggaagtggatacctacggcatctctatccccatcaccaaacataactatttagttcgcgacatcgccgagcttcctcaggttattagcgatgcgttccgcattgcgcagtccggccgcccgggcccggtgtggatagacattcctaaggatgtccagaccgcagagatcgagatcgacgttctgccggagccgggcgagcgtgcccccgcgccggagttcagcgctgagagcgtgcgcgacgccgccgccatgattaacgccgccaaacgcccggtgctctatctgggcggcggggcgattaacgctgcggatgaaatccgccagtttgcggaaaaagccaacctgccgaccaccatgaccctgatggcgctgggtatgctgcctaaagcgcacccgctgtccctggggatgctgggcatgcacggcgcgcgcagcaccaactacatcctgcaagaggcggatttgctgattgtgatgggcgcgcgttttgatgaccgggcgattggcaaaaccgagcagttctgcccgaacgcgaaaatcattcacgtggatatcgatcgcgccgagctgggtaaaatcaagcagccgcacgtggcgattcagggcgacgtggccgaagtgctggcgcagctgatcccgcaaaccgacgcgaccgatcgcgccgactggcgccagctggtggccgatctgcagcgcgagttcccgggtgcgatcccaactgaaggcgacccgctgagccactacggcttgatcaacgccgttgccacctgcgtggacgacagcgcgattatcaccaccgacgtgggccagcaccagatgtggaccgcccaggcctacccgctgaaccgtccgcgccagtggctgacctccggcggcctcggcaccatgggctttggcctgcccgcagctgtgggcgcggcgctggcgaatccggaccgcaaggtcatctgcttctccggtgacggcagcctgatgatgaacattcaggagatggcgaccgcagccgaaaaccagttagacgtgaaaatcatcctgatgaacaacgaggcgctggggctggtgcaccagcagcagagcctgttctacaagcagggcgtgtttgcggcgacctatccggggatgattaactttatgcagattgccgccggctttggcctgcacacctgcgatctgaacgcggaagaggatgcccacgcggcgctgcaggcggcgatttctcgcccaggaccggcgctgatccacgtgcgtatcgaccctgaacaaaaagtgtatccgatggtgccgccgggtgcggcaaatactgagatggtgggagaataagccatgcagaaacaacatgataacgtcattctggaactcaccgtccgcaaccaccctggcgtcatgacccacgtctgcgggctgtttgcccgccgggcgtttaacgtggaaggcattctctgtctgccgattcagggcagtgagcacagccgcatctggctactggtcaacgatgaccagcgtctggagcagatgatggcgcagatcgacaagctggaggacgtcaccaacgtggcgcgcaaccagtccgatcccaccatgtttaacaaaattgcggtgttcttcgaatagatcgcttaaggtaagcgtctttcgctcttgtaggccggataagcgcagcgccatccggctttttcagaccgcaggaacacacatgaccaccatcgcccttatcgacgaccaccttatcgtccgctctggctttgcccagcttctcaacctcgaaccggatttccaggtcgtggccgagtttggctccggccgcgaggcgctggcgggcctgccggggcgcggggtgcaggtctgtatctgcgacatttcgatgccggatctctccgggctggagctgttaagccagctgccgaaaggaatggcgaccattatgctctcggtccacgacagcccggcgctggtcgagcaggcgctcaacgcgggcgcgcgggggttcctctccaaacgctgcagcccggacgagctgatcgccgccgtgcgcaccgtctccaccggcggctgctacctgacgccggaaatcgccatcaagctggcggccggacgacaggatccgctcacccggcgcgagcgtcaggtggctgagaagctcgcgcaggggatgtcggtaaaagagattgccgccgagctggatctgtcgccgaagaccgtgcacgtccatcgcgccaacctgatggaaaaactcaacgtcagcaacgacgtcgagctggcgcgccgcatgttcgacagctggcaatgagtcccgtcttttcgcggctgatcgccgtcgttgccagcttttttatcttctccgccgcgtggttctgcctgtggagcatcagcctgcatctggtggaacgtcctgagctggcggtactgctgttccccttcggcctgcgtctggggttaatgctccagtgcccgcgcggctactggcccgttttgctgggcgcagagtggctgctgctggtctggctggcgcaggaagtggccctcgcgcatctgcccttattgatgaccggaagtctgctcacgcttctcccggttgcgctcatttcccgctatcgtcaccagcgcgactggcgcacgctgctgcgccagggggcggcgctgattgccgccgcgctgctgcagtccctgccgtgggttggcgacaaggagatgctcaacgccctgctgctgaccctcaccggcggcctgacgctggcgccgacctgtctggttttctggcactacctcaccagcaccgtctggcagccgcttggtccggggctggtgtcccaaccggtgaactggcgcgcccggcatctcatctggtatctgctgctgttcgtggtgagcctctggcttcagctgggtttgcccgccgagctttcacgcttcacgccgttttgccttgcgctgccgattattgctctggcctggcactatggctggcagggggcgctgatcgccaccctgatgaacgccatcgcgctgatcgccagccagacctggcacgaccatccggtggatctgctgctctcgctgctggcccagagcctgaccgggctgctgctcggggcgggcattcagcgcctgcgcgagctgaaccagtccctgcagaccgagctggcgcgcaaccggcgtctggctgaacgcctgctggagacggaagagagcgtgcggcaggaggtcgcccgcgagctgcacgatgacatcggccagacgatcaccgccatccgcacccaggcgggcattgtccagcgcctggcggcagaaaacgcaggcgtgaagcagggcggggcgcatattgaacagctttcgctgggcgtgtatgactcggtgcgacgcctgctcggcaggctgcggccgcgccagcttgacgacctgtcgctggagcaggcggtacgctccctgatgcgcgagatggagctggaaagccgcggcattgtcagccatctcgactggcgcattagcgaacctgcgctgagcgaaggccagcgcgtaaccctgttccgtgtctgtcaggaggggctgaacaacatcgtcaagcacgccagcgccagcgcggtcacgatccagggctggcagcaggacgagcgcctgatgctggtgattgaagacgacggctgcggcctgccgcccggctccggccagcagggctttggcctggcgggcatgcgcgagcgcgtgaaggcgctgggcggcacgctgagcctctcctgcacccacgggacgcgcgtcagcgtcagcctgccgttaaggacgcatcatgtttaaaaccccagccagcgcagccccgttaagcaacaaagcggaaatcgacgcccgctaccgctactggcgacgtcatattctgattaccatctggctcggctacgcgctgttctactttacccgcaaaagcttcaacgccgccgcgccggaaatcctcgccagcggggtgatgacccgcaccgacatcggcctgctggcgacgctgttttacatcacctacggcctgtcgaagttcttctccggcatcgtcagcgatcgctccaacgcgcgttatttcatgggcgttgggctgatcgccaccggcgtggtgaatattctgtttggcttctccacctcgctgtgggcctttgccctgctgtgggcgctgaacgcctttttccagggctggggcgcgccggtctgcgcgcgtctgctcaccgcctggtactcgcgcaacgagcgtggcggctggtgggcgatatggaacaccgcacataacgtcggcggggcgctgatcccgatggtggtgggtgccgcggcgctgcactacggctggcgcgcggggatgatgattgccggtggcctggcgattgtcgccgggctgttcctctgctggcgcctgcgcgacaggccgcagaccgtgggcctgcctgcggtgggcgactggcggcacgacgagatggagattgcccagcagcaggagggcgcggggctgacccgcagggagatcctcaccaaatacgtgctgaaaaacccgtacatctggctgctgtcgctctgctacgtgctggtctacgtggtgcgcgcggccatcaacgactggggcaatctgtacatgtccgagacgctcggcgtggacctcgtgaccgccaactcggcggtcacgatgttcgagctgggcgggtttatcggcgcgctggtggcgggctggggctcggataagctgttcaacggcaaccgcggcccgatgaacctgatctttgccgccgggatcttgctctccgtcggctcgctgtggctgatgccgttcgccagctacgtcatgcaggcggcgtgcttcttcaccatcggcttcttcgtgtttggcccgcagatgctcatcggcatggcggcggcggagtgctcgcacaaggaggcggccggcgcggcgacgggctttgtcgggctgtttgcctacctcggcgcatcgctctccggctggccgctggcgcgggtcatcgacatctggcactggagtggcttcttcgcggtgatcgccatcgcggcgggcatttccgccctgctgctgctgccgtttttacatgcgcaggccccgcgtgaagccagcgtgatgtgatgcgcctcaccttttcaccccgagtggcgcaaaactaggaaattttcccggttttacctggacgctgtctcaggcatctctcccggctgatttttacaatgctgcaaaaatcagctcaggagtaaaccaaccatgctggccttcttaaaccaggtgcgcaagccgactctggatctgccgctcgacgtgcggcgcaagatgtggttcaaaccgttcatgcagtcctatctggtggtcttcatcggctacctgaccatgtatctgatccgcaaaaactttaacatcgcgcagaacgacatgatctcgacctacgggctgagcatgacgcagctggggatgattggcctgggcttctccatcacctacggcgtgggcaagaccgtcgtttcctactacgcggacggcaaaaacaccaagcaattcctgccgtttatgctgatcctctccgccatctgtatgctcggcttcagcgccagcatgggcgcgggttccgttagcctgttcctgatgatcgccttctacgccctgagcggtttcttccagagtaccggcgggtcgtgcagctactccaccattaccaaatggaccccgcgccgcaagcgtggttcctacctcggcatgtggaacatctcccacaacctcggcggggcgggcgcggctggcgtagcgctgttcggcgcaaactacctgttcgacggccatgtgatcggtatgtttatcttcccgtcgattatcgccctgatcgtcggctttatcggcctgcgctacggcagcgactccccggaatcgtacggcctcggcaaagcggaagagctgttcggcgaggagatcagcgaagaggacaaagagaccgaagagaacgagatgaccaaatggcagatctttgttgagtacgtgctgaaaaacaaagtgatctggctgctctgcttctcaaacatcttcctctacgtggtgcgtatcggcattgaccagtggtcaaccgtgtatgctttccaggagctgaagctttctaaagaagtagcaattcagggcttcaccctgttcgaagtgggcgcgctggtcggcacgctgctgtggggctggctctccgacctcgccaacggccgtcgcgcactggtggcctgcatcgcgctggcgctgattattgccaccctcggcgtctaccagcacgccagcaaccagtacgtttacctggcgtccctgttcgcgctcggcttcctggtgtttggtccgcagctactgatcggcgtggcggcagtgggcttcgtaccgaaaaaagcgatcggcgccgccgatgggattaaaggcaccttcgcctatctgatcggcgacagctttgccaagctgggtctggggatgatcgccgacggcacgccaattttcggactcaccggctgggcgggcaccttcgcggcgctggatgcggcagcgatcggctgtatcgtcctgatggcgatggtcgcggtgcttgaagaacgtaaaattcgccgtgaaaatcgcgcgcagaaattaaaaacagcctgagtgtgcaggtaacgtctttgcccggtgtgtgatgccgggcttttttatttgcgccaacggcgttaatacctgatcccccattccgcagcgtcttttcagagcactattctggttatgcccgctgttgacgccgtgcgtttcccgctatgatgagcggctagtctaaggagaacgcatggtctggataatgctggcaacgcttgccgtggtgtttgtggtgggatttcgcgtcctgacctcagattcccgccgcgccatcaaacgtttaagcgagcgtcttggcatcaccccgatgccggttgagtcgatgatcgatcagttcggtaaaacgccgggcaatgagtttatccgctaccttgaacggccggacgaggcgcatctgcaaaacgccgcgcaggtgctgctgatctggcaggtctgcattgtcgacggcagcgaggagaacctgcacgcctggcaccgcatgctgcgtaaagcccgcctggccgcgcccattaccgatgcgcaaattcgtctggcgcttggctttatgcgcgagatggagcccgatccgcaggagctgaacgccttccagctacgctataaccagctcttcctgccggaagagggcgtgttttacctgcactgatcccctgtaaaaacgacaaaagttgtctaaacgttaaattcgtcacacttttgatgataaactgcgcgacttttccgcacgtttttatcttcaggtgacgccatgacagaacatatccagcccacgacccgaccgcagaccaaagaggttactcgccccaactggtcggcggttttctccgtggcgttctgcgtcgcctgcctgattaccgttgagtttctgccggtaagcctgctgacgccgatggcgcaggatctgggcatttccgaaggcgtggcagggcagtccgttaccgtcaccgccttcgtggcgatgttcgccagcctgtttatcacccaggtgattggcgcgattgaccgccgcaaggtggtcattctgttcagcgtgctgctgacgctctcctgcctgctggtctcgtttgcggaaagctttaccctgctgctgctggggcgcgcctgtctggggctggggctcggcggcttctgggcgatgtcggcctcgctcaccatgcgcctggtgcccgcgcggacagtgccgaaagcgctttccgttatcttcggtgcggtctccatcgcgctggtgatcgccgcgccgctgggcagcttcctcggtgggattatcggctggcgtaacgtcttcaacgccgcggcggtgatgggcctgctctgcatcatttgggtgtggaaagcgctgccgtccctgccgggcgaagcggcgcaccataagcagaatatgttcgcgctgctcaagcgccccggcgtgctggcggggatgaccgccatctttatggcctttgccgggcagtttgccttctttacctatatccgcccggtgtttatgaccatggcgggctttgacgtagacggcctgacgctggtgctgctgagcttcggtatcgccagctttgtcggtacctcgctgtcgtcccagttcctgaaacgctccctgaaggtggcgctggcgggtgcgccgctggtgctggcggcgagcgccacggtgctggtgctgtggggcagcgataagtgggtcgcgtctgccattgcgattatctggggctttgcctttgcgctggtgccggtgggctggtcgacgtggatcacccgctcgcttgccgatcaggcggaaaaagccgggtcgattcaggtggcggtgatccagctggcgaacacctgcggcgcggccattggcggcgtggcgctcgaccatctggggctgacgtcaccgctggtgatttccggcacgctgatgctgctgacggcgctgctggtggcggggaaggttaaagcgaagtagtgtttttctccctctcccgtgggagagggttggggtgagggcatcaggctacgccgatgccttaacccttctacgcgaatccatcgaaatcagcaccaccgacgacacaatcagcagcgtccccagccagtccggcagggtaaacgccacgcccagcaacaccaccgacagcagcgcgctgctcagcggctcggcgcagctcaggatgctcgccttcggcccgccgatcatctgtgcgcctttcagatacaggctgaacgtcagcgcggtgccgatcaccaccaggtagaaaaacgccagcagcaggccgccgtcgatcacgaaggtggtgccgcgtccggcgtagaacggcgtcagcattaatccggcaatcaacatactccagccgacaatcggcaatgtgccgtagcgggcaatcagcgttgacggataggtggtgtaaaacgcggcggcaaacgccgaggcgatgccgaagaacagggcggcaggcgagatggagagcgaggttgggtcgccgtgggtgaccagcaggaacgtcccgacaagcgaggtcacaatcgcggacaaaacaaacacgccggggcgctttttccgcgccagcgcgaaccatgccacgataatcgttggcgacagaaactgcagcacggtggccgtcgcggcgttggatttttcaatcgtcagcaggaaggtgagctgcacggtgagcgcgccgaccagcgagaaaaacagcaggctgagggcgtctttgcgatgcttgatgaccgagaaaatcttgtcgccgtgaacgaaggagagcgtcagcaggatcacgccggtaaacagcaggcgaaccatggtcaggtaaggcgaagaaatgtggcttttctccatgatgtactgcgcgcaaacgccggaactgccccataaaacggcggcgatcaggacgttcagcatccctttacgtgtggaacccattttctcccctgttatgttggtttttttgtagcataacatgggatcttgccgggtggcgctacgcttacccggcctacaaaaccttgtaggcccgtgcaagcgcagcgccgccgggcgaaacaaacgacgctctactagaaccacgcctcccacatcgcgccgacgttgaagtcgtcgagcgtctcgtctttggtgttgttcacgcgcgcggtgcgtgcgttatccaccttgccgccggtcacgtagaagcgcagcatcggacggaactccggccccatggcgatagacatgttctgcgacagggtcagcttccagcccttgttgtcgccgccgttgtcgtaatccacgtgctgccagcccgcttccagccaggtggagtgaacgtcgttccaccagtgcatcgggcgcacgatggcgttgtagttcttacggttgtcggtcttatcacggctgttgtcgtagtcgtggaaggcgaggatgtactccacctgcgtggcctgggtgaatttgtacagcccttcgaagctggcgtagaccgtggtcaggtcttcggttttattgaacacgctgttgtccgagttatcggagtagcgggcaatcaccttgttcacgccgctgtcgttggtatggctcagcaccacgccaccctgccaggcgttcagacgctcgtcgctctccaccgcttttgaatcaaagccgtagttggcgtacagctccagatccagcggaccgagcttcataccgtggattttagaggtggccgcgtagttacctttgtcgcccgtgccggacccgccggtacaggtgatgcgtgacgggttcgcttcgtcttccatcacttccgggctacaggattccactgccgccacggcagcgacgtcaaactgcacgccgccgatatcgaagttcttcaccccggcgccctggccgtcgtggttcatccagaagtaatcgttgatgccctgctgcggacgctggtggaagtcgcgaccggcccagaaataggcgttcgggttggaggccataatgttggtcacccccgcgtaggcctttttcaggttaacttcgtcgccccagtggtcgatcatcacgttgatgtcccagatggcgccgttttcgcccttgaaggccttggagagctggaactcgccgccgttgccttcgttacccagacgaccgatcgcggacgcgccgttgtaggagccatccaccgccacatatttctgatcggcggcctggaagtgcgcgccgtagcgggcgtagccggtaaatttaatcccgaacggaatcgccatgtccggggattgcgccgcgctttgcggctcggtcaccacgtccgcttttttcgcgacggcggcatccattttggcctgacgttcggccagggctttatccaccgctttcgccacaatggcgtcgatttgctcctgcgtgaattcctgggcgagcacggaaattgggcaaagcgcggcgataaccgccatggttaatggaagttttttaatcgtattcatggttatctcaatatagtttaattttattcagacaataacattttggtttattggtatcataaaattccacttaactgtataatataataactttataccgaattttaaatcagcaatcaggttttgtggaccgggaaaatggaaataatgaaggatagagcgagaaagttgaaaattctcgagaaacggcttatagtaagattaaagtcaaatatagtcaaagtcagtaaaggagggggttgagtgggacataatatttctgacatcattgaacaatatttaaaacgagtgttagatcaaaatggcaaggaaattttagagattaaacgaagtgaaattgcagataaatttcaatgcgttccttcccaaataaattatgtcatcaacaccagatttacaagcgaaagaggatatattgttgagagcaaacgcgggggcggcggttacatcagaatcattaaaattaaaatgaacaatgaagttgtcctgatcaataatataatttctcaaattaatacccatttgtctcaagcagcctctgatgacattattttaaggctattagaagacaaggtaatttcagaaagagaagcaaaaatgatggtcagcgtaatggaccgctcagttttacacattgacttacctgaacgtgatgaattaagagcgagaatgatgaaggcaatgctgacttctttaaaattaaaataagcgggtgaaaagattgatttgtcaagagtgccacgagagaccagccacttttcactttacaaaggttgttaacggagaaaaaatagaagttcatatttgtgaacaatgtgccaaagaaaatagtgattcatatggtataagtgcaaatcagggtttctctattcataatttactttcgggtttactgaacatggattcttcatttcaaaatgcaggaactcaaatgttcagtcactcggagcaaatatctgcttgtccgaaatgcggaatgacttttcagcaattcagaaaaattggccgttttggatgttctgaatgttacaaaacatttcatagcaacattacaccaatcctacgtaaagtgcacagcggaaacactgtgcatgcaggtaagataccgaaacgaataggcggcaatcttcatgtcagacggcagattgatatgctaaaaaaggaattagaatccttaatccatcaagaagaatttgaaaatgcagctcatgtaagagatcaaattcgtttattagaacaatcactcaaaagtacagatagtgaggaggaacaggagtaatgtcgctaaagcattttattcaggacgcactaagcagttggatgaagcagaaaggacctgaaagtgacattgtactcagcagccgcatacgtttagcaagaaactttgagcatattcggttccctacgcggtattccaatgaagaagcctcatccatcatacagcaatttgaagatcagttttcagagcaagaaattcccggaatcggcaaatttgttttgattagaatgaatgatgcacagcctttagaaaagcgtgtacttgttgaaaaacatctaatcagcccgaatttgacagagtctccttttggcggctgtttgctttctgaaaatgaggaagtaagcgtcatgctaaatgaagaggaccatattagaattcagtgtcttttccctggatttcagcttttagaagcaatgaaagccgcaaaccaggtcgacgactggattgaagaaaaagttgattatgcattcaatgagcaaagaggatacttaaccagctgtcctacaaacgtaggtactggtttaagggcttcggtcatgatgcatctgccggcgctggttttaactaggcaaataaatcgaattataccggcaattaatcaattaggcttagttgttagaggaatttatggggaaggcagcgaagcagtagggaatatctttcaaatttcaaatcagatcacgcttggtaagtcagagcaggatattgtagaggatcttaacagtgttgctgctcagttgattgaacaagaacgatctgcccgagaagcgatttatcaaacttctaaaatcgaacttgaggatcgggtatatcggtcatatggggtcttgtctaattgccggatgatagaatcgaaagaaactgcaaagtgcctttcagatgttcggttaggcatagacttaggcataataaaaggactttcaagcaacatacttaacgaacttatgattttgacgcagccagggtttttacagcaatactcgggaggcgctttgcgaccgaacgaaagggacattcgaagagcggctctcatcagagaacggcttcacttagaaatgaatgggaaaagacaggaggatgaatcgatatgatgtttggaagatttacagaacgagctcaaaaagtactggcgctagcacaggaagaagcacttcggttaggtcataataacattggcactgagcatattttattaggactggtaagagaaggagagggcattgctgctaaagctcttcaagcgcttggactcggttcagaaaaaattcagaaagaagtagaaagtttgatcgggcgcgggcaggaaatgtctcaaacgattcattatactcctagagctaaaaaagtcattgagctttcaatggatgaggcaagaaaactcggtcattcttatgtgggaacagaacatattcttcttggtctgattcgtgaaggagaaggtgttgctgcgagagttctgaataatctcggtgtcagcttaaataaagcaagacagcaggtgctccagcttctaggaagtaatgaaacaggatcatcagcggcaggaacaaacagcaatgcgaatacgcctacgcttgacagcttggcaagagacttaactgctattgcgaaggaagacagccttgaccctgtaatcggcagaagcaaggagatccagcgtgtcattgaagtgttaagccgcagaacgaaaaacaaccctgttctcattggggaaccaggtgtaggtaaaacggctatcgcagaaggtttggcacagcaaattatcaataatgaagtacccgaaattttgcgtgataaacgtgtgatgacattagacatgggaacagttgttgccggcacaaaataccgcggagaatttgaggatcgcctgaagaaggtcatggatgaaattcgccaggcaggaaatatcattctattcatcgatgagctccatacattaatcggggcaggcggagcagaaggtgctattgatgcatctaatattttaaaaccttcacttgctcgtggcgaactccaatgtattggtgcaacgactcttgatgagtaccgtaaatatattgaaaaagatgcagcactggaacgccgttttcagccgattcaggttgatcagccatctgtagatgaaagtattcaaattttacaaggtctgcgtgacagatacgaagcccaccaccgcgtttctatcactgatgatgccattgaagctgcggttaagctttctgacagatatatttctgaccgcttccttccggataaagcaattgacttgatcgatgaagcgggttcaaaggtgagactgcgctcatttacaacgcctcctaacttaaaagagcttgagcagaagcttgatgaggttcgtaaagagaaggatgcggcagtgcaaagccaagagtttgaaaaagctgcttccttgcgtgatactgaacaacgcctgcgcgagcaagtagaggatacgaagaaatcatggaaagagaagcaagggcaggaaaactcagaggttactgtggatgatattgcgatggttgtatccagctggaccggtgtgcctgtatctaaaatcgcccaaactgaaactgataagcttctcaatatggaaaacattcttcactcccgtgtcatcggccaggatgaagcagttgtagcggttgcaaaagccgtcagacgtgcaagagcaggattgaaagatcctaaacgcccaatcggctcattcattttcttaggccctacaggtgtaggtaaaacagaacttgcacgagcacttgctgaatccatttttggcgatgaagaatccatgatcagaattgatatgtctgaatacatggaaaaacattcaacttcaagacttgttggttcacctccgggttatgtgggatatgatgaaggcggtcaattgacagagaaagtcagaagaaaaccttactctgtcgtgcttcttgatgagatcgagaaagcgcaccctgatgtcttcaatatccttctgcaagttcttgaagacggacgattgactgattctaaaggacgcacagtcgatttccgcaataccattctgatcatgacatcaaacgtcggagcaagtgagctaaaacgcaataaatatgtcggctttaacgttcaggatgaaactcaaaatcataaagacatgaaagataaagtgatgggtgaattaaaacgagcgttcagacctgagttcatcaaccgtattgatgaaatcattgtcttccattcacttgagaaaaaacatctcactgagattgtgtcattaatgtctgatcaattaacgaaacgcctgaaagaacaagatctttctatcgaattgacagatgctgcaaaagcgaaagtcgcggaagagggcgttgacctggaatacggtgcccgtccgttaagaagagcgatccaaaaacatgtcgaggatcgtttatctgaagaactcctcagaggaaatattcataaaggacagcatattgttcttgatgtagaagatggcgaatttgtcgtaaaaacgactgctaaaacgaattaatatagaagacggaaatgaggcatacagcatgtaagtgtatgcctcactttcatatcaagaaatagaacaagggagaggtcttacactatatatggctaaaacaaaatcgaagttcatctgccaatcctgcggctacgagtctccaaaatggatggggaaatgtccgggctgtggtgcttggaatacaatggtggaagaaatgattaaaaaagcaccggccaatcggagagcggctttttctcattctgttcaaactgtacagaaaccttcacctattacatcaatcgaaacatcagaagaaccccgcgtcaaaacccagcttggcgagtttaacagagtactcggcggaggtgtcgttaaaggctccctcgttttaattggcggtgatcctggtatcggaaagtcaacgctattactgcaggtttccgctcaattatcaggctcatcaaacagtgtcctgtatatttcgggagaagaatctgtaaagcaaacgaagctgcgagcagaccgtctcggcattaataatccgtcactgcatgttttatctgaaaccgatatggagtatatttcgtctgctatacaagagatgaatccatcgtttgtcgttgttgactctattcaaacggtttaccaaagcgatattacatctgctccaggcagtgtgtcacaggtcagagaatgtaccgctgagctgatgaaaattgcaaaaacaaaaggtattccgatttttatcgtagggcacgtgacgaaagaagggtctattgcaggtccgagactgttggagcatatggttgacactgttttatattttgaaggagaacgccaccatactttccgtattttgcgggctgtaaaaaaccgtttcggatctacaaacgaaatgggcattttcgaaatgcgggaagaggggctcactgaggttttgaatccttcggaaattttcttagaagaacgctctgctggttccgcaggctcgagtatcactgcctctatggagggcactagaccgattctcgttgaaattcaggcactcatctcgccaacaagttttggcaacccaaggcgtatggcaacgggaatagaccataacagggtttctctgttaatggctgtgttagaaaaaagagttggactgctgctgcaaaatcaggatgcttatttgaaagtggctggcggcgttaagcttgatgaaccggcaattgatcttgcgattgtgattagtattgcatcaagctttagagacacacctccaaatcctgcagattgttttattggagaagtgggattaaccggagaagtccggcgggtttcaagaattgaacagcgtgtgaaagaagcggcaaagcttggttttaaacgcatgatcatacccgcggcaaatctggatggatggacaaaaccaaaagggattgaggttatcggagtagcaaatgttgcagaagcgcttcgtacttcattaggaggataatagatggaaaaagagaaaaaaggggcgaaacacgagttagacctgtcatctatattgcagtttgttgctccgggtacaccgctcagagcggggatggaaaacgtcttgagagcaaatacaggcggtctgattgttgttggatataatgataaagtaaaagaagtggtggacggcggctttcacataaacacggctttttctccggcgcatttatatgagctggctaaaatggatggagcgatcattttaagtgattctggtcaaaagatcctatacgcgaatactcagctgatgccggatgccacaatttcttcatcagaaacaggaatgcggcacagaactgccgaaagagtagctaagcaaactggctgtcttgtaatcgccatttctgaaagaagaaatgtcataacgttatatcaggaaaacatgaagtatacactaaaagacataggatttattttaaccaaggcgaaccaagccattcaaacacttgaaaaatataagacaatcctcgataaaacgattaatgcactgaacgcgttagagtttgaggaacttgttaccttcagtgatgtcttgtctgtcatgcatcgttatgaaatggtactgagaatcaaaaacgaaattaatatgtatatcaaagagctggggacagaagggcatctgatcaaactgcaagtcattgaattgattacggatatggaagaagaggccgctttatttattaaggactatgtaaaagaaaagattaaagatccgtttgttctcttgaaggagctgcaggatatgtccagttatgatctgctggatgattccattgtgtataagcttctcggttaccctgcttctactaatcttgatgattatgtattgccgagaggatacaggctgttaaataagataccgcgtcttccgatgccgattgttgaaaatgttgtagaagcatttggagtcctgccaaggattattgaggcgagtgcagaagaattagatgaagtagagggaatcggtgaagtacgagcccaaaaaatcaaaaaaggattaaaacgcctgcaagagaagcattatttagacagacaactgtgatttcggttaaaaccttatgaatacgggtatattaatgttggtttttgtttattctgatattcgtaggatgcataagactttgtgaaattaaaatgttaaaaaaggaggtgggggtatgttaaaacgaatagttcaggcgttcttcattatttttggcggcgttgttggtatatttttgatacctgaattgtttgtactgttaaatatacaggacatacctttaataacaaacgcatatacgtctgcggcaataggagcaattatcttttttctcatcagtatatggggtacagaatacgttgtgaactgggtgaagtggatagaggattcattgttaaaagcgccggttccagatttgttatttggaagtcttggcttagtttttggacttataattgcttatcttatcgtaaatgttattcctttagacaatataccttaccgcatattcagcacaataattcctgtatttttggctttcttcctcggttatctcggcttccaggtgggctttaagaaaaaggatgaattgatcagcctgttttccatttccgccagaatgcaaaagaaaaaaggaacagctgatgaagaacatgaggttcaagacaagaagctgaaaattttggacactagtgttattattgatgggagaatagcagatatttgtcagactggttttttagagggagttatcgtgattccgcagtttgtccttgaggaattgcagcatattgcagactcttcagatgttttaaaacgaaacagaggacgccgcggtcttgatatcctgaaccgcattcagaaagaattagacattgaagttgaaatttacgaaggcgactttgaagatattcaggaggttgacagcaagctcgtcaaacttgctaagctgacatccggggtcgttgtgacgaatgattttaatttaaataaagtgtgcgagcttcagaaggtagcagtattaaacattaatgaccttgccaatgcggttaagcctgttgtgcttcctggcgaggaaatgaatgttcaggtcattaaggacgggaaagagcataatcagggagttgcctacttggatgacggtacgatgattgtcgttgaagaaggacggaattatatcggcaagcatattgatgtactcgtcacaagtgtgctgcagacagcagcgggacgaatgatttttgcgaagcctaagctgttggagaaggcgctgtaaagggagaagaaacaatgagttatgatgtggtgattcctgcagccggacagggaaagcggatgaaggcagggagaaataaactgttcattgagctgaagggagacccggtgatcatacacacgttaagagtgtttgacagccaccggcagtgcgataaaatcattttggtgattaacgagcaggagcgggagcactttcagcaattgctgtccgattacccgtttcaaacttcaattgagcttgttgcaggcggagatgagcgacagcacagtgtgtataaggggctgaaagccgtaaagcaggaaaagattgtccttgtacatgacggtgcccgtccatttataaaacatgaacaaattgacgaactgatcgcagaggcggaacagacaggagcggccatccttgctgttccggtaaaagatacgattaaacgcgttcaagatttacaagtcagtgagacgattgaacgttcaagcttgtgggctgtccaaacgccacaagcttttcgtctttctttattgatgaaggctcacgctgaggccgagcgcaagggatttttagggacggatgacgccagcctcgttgaacagatggagggcggttcggtccgtgttgtagaaggcagctatacaaatattaagctgacgacgccagacgatttgacgtcagctgaagctatcatggaatcagaaagtgggaataaacatgtttagaattggacaaggatttgatgtgcatcaattagtggagggccgtcctctcattattggcggaattgaaatcccgtacgaaaaagggctgcttggccattctgatgcagacgtattgttgcataccgtcgctgacgcctgcctgggagctgtgggtgaaggagacataggcaagcattttcctgacacagatcccgagttcaaggacgcagattctttcaaattacttcagcatgtctggggaatcgtgaaacagaaggggtatgtccttgggaacattgattgcaccatcatagcgcaaaagccgaagatgctgccgtacatagaagatatgagaaaaagaattgctgaaggccttgaggcagatgtttctcaagtaaatgtaaaagcaacaacgacagaaaagcttggatttacaggccgggcggaaggaatagcggctcaggcgacagtactgatacaaaaaggctaacttgttttgatgccgggtctatttggtggtagaatagattcatacatttttgcctgaggccatacatgacatgaaaggaagtatttgaaaatgggaaacgaagtacgcgtccgttatgcaccgagtccaaccggacatttgcatattggaaatgccagaacggcgctttttaattatttatttgcccgcaatcaaggcggtaagtttatcattcgagttgaggatactgataaaaagcgcaatattgagggcggagaacaaagccagctgaattatctgaagtggctaggtattgactgggatgagagtgtggatgtcggaggagagtacggtccataccgtcagtcagagcgtaacgatatctataaagtgtactatgaagagcttcttgaaaaagggcttgcttataaatgttactgtacggaagaagagcttgaaaaagagcgtgaagaacagattgcccgcggagaaatgcctcgttattccggaaaacacagagacctgactcaggaagaacaggagaaatttatcgccgaaggcagaaaaccaagtattcgtttccgtgtgccggaaggaaaagtcatcgccttcaacgacatcgtaaaaggcgaaatttcttttgaatcagatggcatcggcgacttcgttattgtgaaaaaggacggaacgcctacttataacttcgcggtagctattgatgactacttaatgaaaatgacacacgtgctgcgcggtgaggatcatatttctaacacaccgaaacagattatgatctatcaagcattcgggtgggatattcctcagttcggacacatgacgctgattgtaaacgaaagccgtaaaaagctcagcaaacgtgatgaatccattattcaattcatcgagcagtacaaagagcttggctacctgccagaagcgctgttcaactttatcggcttgttaggctggtcaccggttggagaagaagagcttttcacaaaagagcagtttattgaaatttttgatgtaaatcgtttatctaaatcaccagctttgtttgatatgcataagctaaaatgggttaacaaccaatatgtgaagaagctggatcttgatcaggttgttgaactgacgcttccgcatttgcaaaaagccggcaaagttggcactgagctttctgctgaagaacaagaatgggttcgtaaactgatttccctgtatcatgagcaattaagctacggtgcggaaattgttgagctgactgatttgttctttacggatgagatcgagtataatcaagaagcgaaagctgttctggaagaagaacaggttcctgaagtgctcagcacattcgcagcgaagcttgaagagcttgaggagttcactccggataatatcaaagcatcgatcaaagcagtgcagaaagaaactggccataaagggaaaaaactgtttatgccgattcgtgttgctgtaacagggcaaactcacggtccggaactgccgcaatcaattgaattgatcggtaaagagactgcaattcagcgtttaaagaatatctaaataaatgattgttgacagggaagagtataaagctttaggccattacagaaaggatcttcattggctgagagagatccatgagccgggttttagaagtgcgcccttaagacctttgaagaacgttttttgaaatcagtattcaaaggcggccgccgccgttacaggctgaagttgggagagcagaagtctgcttttcaaacagagtggaaccgcgcggttaaagcgtctctgtcatgtttacatgcagagacgctttttttattgggtagaggaaatcagatagagaaacggggggaagcatgtgttttttagaatgctcaaagaagacattgatactgtgttcgatcaagatcccgcagcaagaagctattttgaagtgattttaacttattccggtttacatgctatatgggcgcatcggattgcacatgctttatataaacgaaaattttatttccttgcacgccttatatctcaagtaagccgattttttaccgggatagaaatccaccccggcgctacaatcgggagaagatttttcatagaccacggcatgggggttgtcattggggagacatgtgaaatcggcaataacgtaaccgtttttcagggggttaccctcgggggaacgggaaaagaaaagggaaaaaggcacccaacgattaaagatgacgcattgatagccacaggtgctaaagtgctcggttctattacggtcggtgaaggctcaaagattggcgctggttcagtagtgctgcatgatgttcctgatttttcaacagttgtcggtatccctggacgggtcgttgtacaaaatggcaagaaagtaagacgcgatttaaaccatcaggatttgcccgatccagttgctgaccgctttaagtctttggaacagcagattttagagctgaaggcagaacttgaagacagaaaagaaaggatcaatcaaaaatgacaatcacactttataatacattgactagacagaaggaaacattcgttcctcttgaagagggaaaagtgaaaatgtatgtatgcggacccacggtttacaattacattcatatcgggaacgcgcgtccggcaatcgtttacgatacggttcgaaactatttagagtataaaggctatgatgtgcagtatgtctctaacttcacagacgtagacgataaattaattaaagcggcaaatgaactcggtgaggatgtacccaccatttcagagcgttttattaaagcatactttgaagacgtaggtgcgctcggctgccgaaaagccgaccttcatccgcgagtaatggagaacatggatgccattatcgaattcgtagatcagctcgtgaaaaagggctacgcatatgaatcagaaggtgacgtatatttcaaaaccagagcatttgaagggtacggaaagctttctcagcaatcaatcgatgaactaagatcaggtgcacgcatccgggtcggcgagaaaaaagaagatgctcttgatttcgcactgtggaaagcggcaaaagaaggagaaatctcttgggatagcccttgggggaaagggcgtccgggctggcacattgaatgctcagcaatggtgaaaaagtatctcggtgaccagattgatatccatgcgggcggacaggatttaacattccctcaccatgaaaacgaaattgcgcaatctgaggcgctgacaggcaaaacgtttgcgaagtactggcttcataatggttatatcaatattgataatgaaaaaatgtcaaaatcactaggcaactttgtgcttgtgcatgacatcattaaacagcatgatccgcagcttttgagattctttatgctatctgttcattatcgccatccgattaactattcagaagagcttctggagaatacgaaaagcgcgttcagccgtttaaaaacagcgtacagcaatcttcagcaccgtctgaacagcagtacgaatttaaccgaagatgacgatcaatggcttgaaaaggttgaagaacaccgcaaagcattcgaagaagagatggacgatgattttaatacggcgaatgccatttcagtcttgtttgacttagcgaaacacgccaattattatcttcagaaagatcatacggctgatcatgtgattacggcgtttattgagatgtttgaccgcattgtttctgtcctcggtttttcgttgggtgagcaggaacttctcgatcaagagattgaagacttaatcgaaaagcgaaatgaagcgcgccggaatcgcgattttgcattgtcagaccagatccgcgaccagctgaaaagcatgaatatcattcttgaagatacggctcaaggcactcgctggaaacggggagaataacagatgcttgaatttgatacgataaaagattctaagcagcttaacggtcttgcgcttgcttatataggtgatgccatttttgaagtgtatgtcaggcatcacctgcttaagcagggctttaccaaaccaaatgatcttcataagaaatcaagccggattgtttcagcaaagtcacaggctgagatcctattttttctgcagaatcaatcattttttacggaagaagaggaagcggtgctgaaaagaggcagaaatgccaagtcagggacaacacctaaaaatacagatgttcagacgtaccgctacagtacagcatttgaagcgcttctgggctacctttttctagagaaaaaagaggaacgacttagtcagctcgtagccgaagctatacaattcgggacgtcagggaggaaaacaaatgagtcagcaacatgattacgtcatagggaaaaatgcagtgatcgagacgttaaaatctgatcggaagctgtataagctgtggatggcggaaaacaccgtaaagggacaagcacagcaagtgattgagcttgccaaaaagcagggaatcacgattcaatacgtcccgagaaaaaaactcgatcaaatggtgacaggacagcatcagggcgtagtggcacaggttgcagcgtatgaatatgcagaactggacgatttatataaagcagccgaagaaaaaaatgaacagcctttcttcctcattctggacgagcttgaagaccctcataatcttggttccattatgaggacagcagatgcggtcggcgctcatggcatcgtcattccaaaacggagagctgtcgggctgacaacaacagtggcaaaagcttcaacaggagcaattgagcacattcctgtagcaagagtcaccaatttggcacggacgttagaagagatgaaagagcggggaatctgggttgtcggaacggatgcgtccgcgcgtgaggatttccgtaatatggacggcaatatgcctttggctctagtcatcggaagtgaaggaaaagggatgggccgccttgtgaaggaaaagtgcgattttctcattaaactcccgatggccggaaaggtaacttcactaaatgcatctgtcgcggctggtcttttgatgtatgaagtctaccggaaacgaaaccctgtgggagaataaagacccatggatatcctgttagtagacgggtacaacatgattggagcctggccgcagctgaaggatttaaaagcgaacagttttgaagaggcgagagacgtactgattcagaaaatggcggaatatcaatcgtatacaggaaacagggttattgttgtttttgacgcgcatctcgtaaaagggcttgagaaaaaacagaccaaccatagagttgaagtaatttttacaaaagaaaatgagacggctgatgagcggatagaaaagctcgctcaggctttgaataatattgcgactcaaattcacgttgcgacctctgactatactgagcagtgggcgattttcggacagggggcattgcggaaatcggcccgggagcttctgagagaggtagaaacgattgaaaggcgaatagagagacgggtaagaaaaatcacttccgaaaagccggcgggtaaaattgctttatcggaagaggttttgaaaacgtttgaaaagtggaggcggggagacttagattaagttgacgcttttttgcccaatactgtataatatttctatctacgtgcgccggggggatcggagtgaatctacagaacaacaagggaaaattcaacaaagagcagttttgccagttggaggacgagcaggtcattgaaaaggttcatgttggggacagtgatgcgttagattacttgattacgaagtaccgaaactttgttcgggcaaaagcaagatcctatttcttaataggggcggacagagaggatattgttcaggaaggcatgataggcctctataagtctattcgtgacttcaaagaggacaagcttacctcattcaaagcttttgcagaattatgtattacccgccaaattattaccgcaataaagacagctactcgccagaaacacattcctttgaattcctacgtctcattagataaaccgatctttgatgaagaatcagaccgaacgctgctggatgtcatttcaggagcgaaaaccttaaatcctgaggaaatgatcattaatcaggaagaatttgatgatattgaaatgaaaatgggagaactattaagtgatttagagagaaaagtactcgtcttatatctcgacgggagaagttaccaagagatttctgatgaactgaaccgacatgtgaaatcgatcgacaatgcccttcagcgtgtgaaacgcaagctggagaagtacttggaaattcgcgaaatcagtttgtaataggaatttatgctatattgacagtatttttctgactatgatatgttactaaagataagaactaatgtctatttagaaaaaggtgtaatgacatgagaaaaaagattacgttagcatgcaagacatgcggaaaccgtaattatacgacaatgaagagctctgcatcagcggctgagcgattagaagtaaagaaatactgcagtacttgcaattcacatacagctcatcttgaaacaaaatagtttttgcgcttttaaattgtggaggtcttttacatgcgtattatgaaattctttaaagatgttgggaaagaaatgaaaaaggtaagctggcctaaaggaaaagagttaacgcgttataccattacggtaatttcaacagttatcttttttgttatcttttttgccctccttgacacaggaatttctcaattaattcgtttaatagttgaataatgatcagcaatacgtgctataatagatcataatattacttgccaaaacccgttcagcgggttttttattgtggcttaaaatgaaagttatcataggcttgccgcctattttttgaagcgttatggtaattcactaaaaccaaatgcggggagggaaggactggacagtcctgaatagaatggaaaagaattggtatgttgttcacacgtactctggttatgagaataaagtaaaagccaacttggaaaagcgtgttgaatcaatggggatgcaggataaaattttccgtgtagtcgtacccgaagaagaagaaacggatatcaaaaacggcaagaaaaaagtcgtgaaaaagaaagtattccctggttatgtgcttgttgaaattgtaatgacagacgactcttggtatgtcgtccgcaacacgccgggcgttactggattcgtaggatctgccgggtcaggttcaaaaccgacgccgcttcttccgggggaagcagaaaccattctgaagagaatgggcatggatgaacgaaaaactgatattgactttgaactgaaagagacagtgaaagtaatagacggaccttttgctaactttacaggatcaattgaagagattgattatgataaaagcaaggtcaaagttttcgttaatatgtttggccgtgaaacgccggttgagctggaatttacccaaatcgataaattgtaatgtgaaaaaacttgaaattgctatatataaatgataatatagcaaaggtacgtcttggacttatccaaggcaactagcatgatatttcgtcattcatataaagaatgaaaccttgagtgggagggtttaccctattaccacatcacggacttaaggaggtgtgtctcgtggctaaaaaagtagttaaagttgtaaaattgcaaattcctgctggaaaagctaacccagcaccaccagttggacctgcacttggtcaagccggtgttaacatcatgggattctgtaaggagtttaacgctcgtacagctgaccaagctggtttaatcattcctgttgaaatttcggtttacgaagaccgttcatttacatttattacaaaaactccacctgctgcagtattgcttaaaaaagcagctggaattgagtctggttctggtgaaccaaaccgtaataaagtggcaaccgttaagcgcgataaagtacgcgaaatcgctgaaacgaaaatgcctgacttaaacgcagcagacgttgaagcggcaatgcgcatggttgaaggtactgcccgcagtatgggtattgtaatcgaggattaatttgtttcttgtcgggttgcgagttttaacaagttcgcaacccttattcgtgggaggttattccgctataaccacataaggaggaaattttaaaatggctaaaaaaggtaaaaagtacgttgaagctgctaagcttgtagaccgttctaaagcttacgacgtctctgaagcagtagctctcgttaaaaaaacaaacacagctaaattcgacgctacagttgaagtggctttccgtttaggggttgaccctcgtaaaaacgaccagcaaatccgtggagcagttgtgcttccaaacggaactggtaaaactcagcgcgttctcgttttcgcaaaaggcgaaaaagcgaaagaagctgaagctgctggtgcagatttcgtaggcgatactgactacatcaacaaaattcaacaaggctggttcgatttcgatgttatcgtagctacacctgacatgatgggtgaagttggtaaaatcggtcgtgtacttggaccaaaaggtttaatgccgaaccctaaaactggtacagttactttcgaagttgaaaaagctatcggcgaaatcaaagctggtaaagttgaataccgcgttgataaagctggaaacattcatgttcctatcggtaaagtttctttcgaggatgaaaaacttgttgagaacttcacaacaatgtacgatacaatccttaaagctaaacctgctgcagctaaaggcgtttacgtgaaaaacgttgctgtaacttctactatgggacctggtgtcaaagtagactcttcaacttttaacgtaaaataatattgacatgacatcaacattctgatattattcaaaatgttgtaaaatagaatatcatttataccgtagacagtaggggcctaaccgcttaattatcctaccgaggtgtatattatcacagctattacgttacgtatgcttgtatatacagcctccatgtctcatggaggctttttatatggaatccgtcgtctcagtcgtgatcacctaacggtataagtgttacacaagaatctacaggaggtgtaaccatgagcagcgcaattgaaacaaaaaaagttgttgttgaagaaattgcttctaaactgaaagaaagtaaatcaacgatcatcgttgactatcgcggacttaacgtttctgaagtaactgaacttcgtaaacagcttcgcgaagctaacgttgagttcaaagtttacaaaaatacgatgactcgccgtgcggttgaacaagctgagcttaatggtttgaatgatttcttaactggaccgaacgcgatcgcattcagcactgaagatgttgtcgctccggctaaagttcttaatgacttcgctaaaaatcacgaagctcttgaaatcaaagctggcgttatcgaaggtaaagtttctactgttgaagaagtgaaagctcttgctgaacttccatcacgcgaaggcttgctttctatgttgcttagcgtacttcaagctccagttcgcaaccttgctcttgctgcaaaagctgtggcagaacaaaaggaagaacaaggcgcttaatctaatcagtttttcataaattaaaacaaaatggaggaattacaaatggctttaaatatcgaagaaatcattgcttccgttaaagaagcaactgtacttgaattgaacgacctagtaaaagcaatcgaagaagaatttggcgtaactgctgctgctcctgtagctgtagctggcggagctgctgctggcggagctgctgaagagcaaagcgaattcgatcttatccttgctggtgcaggatctcaaaaaatcaaagttatcaaagttgtacgtgaaatcactggtcttggcttgaaagaagctaaagagcttgttgacaacactccaaaaccacttaaagaaggtattgctaaagaagaagctgaagagcttaaagctaaacttgaagaagttggcgcttctgtagaagttaagtaatcttcacttacctgtaggggaagctcgcttttatgaggcgagctttttctttgccattctttaagccatgaaaaaaggaggttctaataatgagtgagcactattattcagaaaaaccttcagtaaaaagcaacaagcaaacctggtcttttaggcttcggaataaagatttcacgtttaccagcgacagcggggttttttctaaaaaagaagttgatttcggctcccgcctgctgattgattcttttgaagagcctgaggttgagggcggcattttagatgtaggctgcggatacggcccgattggtttatcgctcgccagcgactttaaagaccggaccatccacatgattgacgttaatgagagagccgtagaactatcaaatgaaaatgcggaacagaacggaataacaaacgttaagatttatcaaagcgatttgttttcaaacgttgattctgctcaaacatttgcttctattcttacaaatcccccaatccgagccggaaaaaaagttgtccatgctatctttgagaaaagcgctgaacacttaaaagcttcaggtgaattgtggatcgtcatacagaaaaagcaaggcgcgccttctgccattgaaaagctcgaggaactgttcgatgaagtttccgtcgttcaaaaaaagaaaggctattatatcataaaagcaaaaaaagtttgactcggtattttaactatgttaatattgtaaaatgccaatgtatatattttgcttgatatgatgaattgtcaatatctatgtataaattatacaagtatggaaatgctaataaaatcggtatttgtttttggatgtggttttcttaattagaaacccttttttcttttgtcttgtaaaagtattttctttctttggaagaaatgcttattacacatataatacgcatgatttgaggggtgaatcagttgacaggtcaactagttcagtatggacgacaccgccagcgcagaagctatgctcgcattagcgaagtgttagaattaccaaatctcattgaaattcaaacctcttcttatcagtggtttcttgatgagggtcttagagagatgtttcaagacatatcaccaattgaggatttcactggtaacctctctcttgagttcattgattatagtttaggtgagcctaaatatcctgtagaggaatcaaaagaacgtgatgtgacttactcagctccgctaagagtgaaggttcgtttaattaacaaagaaactggagaggtaaaagaccaagatgtcttcatgggtgatttccctattatgacagatacaggtacttttatcattaacggtgcggaacgtgttatcgtttcccagcttgttcggtctccaagtgtatatttcagtggtaaagtagacaaaaacggtaaaaaaggttttaccgcaactgtcattccaaaccgtggcgcatggttagaatacgaaactgatgcgaaagatgttgtttatgtccgcattgatcgcacacgtaagttgccggttacggttcttttgcgtgctctcggcttcggctccgatcaagagattcttgatctcataggagaaaacgaatacctgcgaaatacgcttgataaagataacacagaaaacagcgacaaagcgttgctggaaatttacgagcgtctccgtcctggagagccgcctacagtagaaaatgcgaaaagcttgcttgattctcgtttctttgatccgaaacgatacgatcttgccaatgtaggacgctataaaattaataaaaaacttcatattaagaatcgcctcttcaatcagagacttgctgaaacgcttgttgatcctgaaacaggagaaatccttgctgaaaaaggccagattcttgatagaagaacgcttgataaagtactgccatacttagaaaacggaatcggttttagaaagctgtatccgaatggcggcgttgttgaagatgaagtgactcttcaatcaattaaaatctttgctccgactgatcaagaaggagaacaggttatcaatgtaatcggcaatgcttacatcgaagaagagattaaaaacatcacgcctgctgatattatttcttcaatcagctacttcttcaacctgctgcacggagtaggcgacacagatgatatcgatcatcttggaaaccgccgtttacgttctgtaggcgagcttctccagaaccaattccgtatcggtttaagccgtatggagcgtgtggttcgtgagagaatgtcaattcaagatacgaatacaattacgcctcagcagctgatcaatattcgtcctgttattgcgtccattaaagagttctttggaagctcacagctttctcaattcatggatcagacgaacccgcttgctgaattaacgcacaagcgtcgtctgtcagcattaggaccgggcggattgacacgtgagcgtgccggaatggaagtgcgtgacgttcactactcccactatggccgtatgtgtccgattgaaacgcctgagggcccgaacatcggtttgatcaactcactatcatcttatgcaaaagtaaaccgttttggctttattgaaacgccatatcgccgcgttgaccctgaaacagggaaggtaacgggcagaatcgattacttaactgctgatgaagaggataactatgttgtcgctcaagcgaatgctcgtcttgatgacgaaggcgcctttattgatgacagcatcgtagctcgtttccgcggggagaacaccgttgtttccagaaatcgtgtagactacatggatgtatcgcctaagcaggttgtatctgctgcgacagcatgtatcccgttcttagaaaacgatgactccaaccgtgccctcatgggagcgaacatgcagcgtcaggctgtgcctttgatgcagccggaagcgccatttgttggaactggtatggaatacgtatcaggaaaagactctggtgccgctgttatttgtaaacaccctggtatcgttgaacgcgtagaagccaaaaacgtttgggttcgccgttatgaagaagtagacggtcaaaaagtaaaaggaaacctggataaatacagcctgctgaaatttgtccgctctaaccaaggtacgtgctacaaccagcgtccgatcgtaagtgtcggcgatgaagtggtaaaaggagaaatccttgctgacggtccttctatggagcttggtgaacttgcacttggccgtaacgtaatggtcggcttcatgacgtgggatggctacaactatgaggatgccatcatcatgagtgaacgcctagtgaaggatgatgtttatacatctatccacattgaagaatacgaatcagaagcacgtgatacgaaacttggacctgaagaaatcactcgcgatattccaaacgtcggtgaagatgcgcttcgcaatcttgatgaccgcggaatcatccgtattggggcagaagtaaaagacggagatcttcttgttggtaaagtaacgcctaaaggcgtaactgaactgactgccgaagaacgccttcttcacgccatctttggcgagaaagcccgcgaggttcgtgatacttctcttcgtgtgcctcatggcggcggcggaattatccatgacgttaaagtcttcaaccgtgaagacggagacgaacttcctccaggtgttaaccagttagtacgcgtatatatcgttcagaaacgtaagatttctgaaggggataaaatggccggtcgtcacggtaacaaaggtgttatctctaagattcttcctgaagaggatatgccttaccttcctgacggcacaccaattgatatcatgcttaacccgctgggcgtaccatcacgtatgaacatcgggcaggtattggaacttcacatgggtatggccgctcgttaccttggcattcacattgcatctcctgtatttgacggagcgcgagaagaggatgtctgggaaacacttgaagaagccggcatgtctcgtgacgccaaaacagtgctttacgacggacgtactggagagccgtttgataaccgtgtatctgtcggtatcatgtacatgatcaaactggctcacatggttgacgataaacttcatgcacgctctacaggcccttactcacttgttacgcagcagcctcttggcggtaaagcgcaatttggcggacagcgttttggtgagatggaggtttgggcacttgaagcttacggtgcggcttacactcttcaagaaattctgactgttaagtctgatgacgtggttggacgtgtgaaaacatacgaagccatcgttaaaggcgacaatgttcctgaaccaggtgttccggaatcattcaaagtattaatcaaagaacttcaaagcttaggtatggatgtcaaaatcctttctggtgatgaagaagaaatagaaatgagagatttagaagacgaagaagatgcgaaacaagctgacggcctggcattatcaggtgatgaagagccggaagaaacagcatctgcagacgttgaacgcgatgtagtaacaaaagaataatctctagttataaaggcaagtgacatcggttaatccgaagataaaaagggaggtaggccccttgctagatgtgaacaattttgagtatatgaacatcggtcttgcttcaccagataaaatccgttcatggtcttttggtgaagtgaaaaagcctgaaacgataaactatcgtacgttaaaacctgaaaaggacggtctattctgcgaacgcattttcggaccgactaaggactgggaatgtcattgcgggaagtacaagcgagttcgttataaaggcgtagtttgtgaccgctgcggagtcgaagtaacacgggctaaagtccgtcgtgagagaatggggcacattgaactggctgccccagtttcccacatttggtatttcaaaggtattccaagccgtatgggtcttgtgctggatatgtcacctcgtgctttagaagaagtcatttactttgcttcttacgttgtaactgatccggcgaatacaccgcttgaaaagaaacagcttctgtctgagaaagaataccgtgcttatcttgataaatacggtaataaattccaagcatctatgggtgctgaagcaattcataaacttcttcaagatatcgatcttgtaaaagaagttgatatgttaaaagaagagctgaaaacttcacaaggacaacgccgtactcgtgcgatcaaacgtcttgaagttttagaagccttccgtaactcaggaaacaagccttcttggatgatccttgatgtgcttcctgttattcctccggagcttagaccgatggttcagctagatggcggacgttttgcgacttctgatttgaatgacctttatcgtcgtgtcatcaaccgtaacaatcgtttgaaacgccttttggaccttggtgcgcctagcatcatcgttcaaaacgaaaagcgtatgcttcaagaggctgtcgatgccctaattgacaacggccgccgcggacgccctgtaacaggtcctggaaacagaccgttaaaatctctttctcacatgctgaaagggaagcaaggccgtttccgtcaaaaccttcttggtaaacgtgtcgattactccggacgttctgtaatcgttgttggtcctcatttgaaaatgtaccaatgcggattaccgaaggaaatggcacttgaacttttcaaacctttcgttatgaaagaacttgttgaaaaaggtcttgctcacaacattaagagtgcgaaacgcaaaattgagcgcgtacagcctgaagtttgggatgtactagaatcagttattaaggagcatccggtactgctgaaccgtgcccctacacttcacagattaggtatccaggcgtttgaaccaacgcttgttgaaggacgcgcaatccgtcttcacccgctcgtatgtacagcttacaacgctgactttgacggtgaccaaatggcggttcacgtaccattatctgctgaagcacaagctgaagcacgcatcttgatgcttgctgctcaaaacatcttgaaccctaaagatggtaaaccggttgtaacaccgtctcaggatatggtactaggtaactattacctgacacttgagcgtgccggtgctgtcggtgaaggtatggtcttcaagaatacagacgaagcgcttcttgcttatcaaaacggatatgttcaccttcatacgagagtagctgttgcagctaactcacttaagaatgtgacatttaccgaagaacagcgctcaaaattgttaattacaactgtcggtaagcttgtcttcaatgaaattcttccggaatcattcccttacatgaatgaaccaacgaagagcaacattgaagagaaaacacctgaccgtttcttcttagaaaaaggtgctgatgttaaagctgttatcgcacagcagccaatcaatgcgccgtttaaaaaaggcattctgggtaaaatcatcgcggaaatctttaaacgattccatattacggaaacgtctaaaatgcttgaccgcatgaaaaacctaggtttcaaatattcaactaaagctggtattacagttggggtttctgacatcgtcgtactcgatgataaacaagaaattcttgaggaagcgcaaagcaaagttgacaacgttatgaagcaattccgccgcggtcttatcactgaagaagaacgctatgagagagtcatctctatctggagtgctgcaaaagacgttatccaaggcaaactgatgaaatcacttgatgaactcaacccgatctacatgatgagtgactctggtgcccgtggtaacgcatctaactttacgcagcttgccggaatgcgcggcctgatggccaacccggctggacgtatcattgagttgccgatcaaatcaagtttccgtgaaggtctgacagtattggagtactttatctccacacacggtgcgcgtaaaggtcttgccgataccgctcttaaaactgctgactcaggttaccttacacgccgtctcgttgacgttgctcaggatgttatcatccgtgaaactgattgcggaactgaccgaggcattcttgctaagcctcttaaagaaggaactgaaacaattgagcgcttagaagaacgcttaatcggacgttttgcaagaaaacaagtgaagcaccctgaaacaggtgaagtgcttgtgaatgaaaacgaactgatcgatgaagataaagcactggagattgtcgaagccggcattgaagaagtgtggatccgttctgccttcacatgtaatacgcctcatggtgtatgtaaacgatgctatggccgaaatcttgcaactggctccgatgttgaagtcggtgaagctgtcggaatcattgctgcccaatcaatcggtgagcctggtacacagttaacaatgcgtacattccatacaggcggggttgccggagacgatatcacacagggtcttccgcgtatccaagagcttttcgaagcgcgtaatccgaaaggtcaggcaacaattacagaaatcgacggtacagtcgttgagatcaatgaagttcgtgataagcaacaggaaattgtggttcaaggcgcagtggaaacacgttcttatacggcaccttacaactcccgcctgaaagtagcggaaggagataaaattactcgaggccaagtactgacagaaggttcaatcgatccgaaagaacttcttaaagtgactgacctgacgactgttcaagagtatcttctccatgaggttcaaaaggtttaccgtatgcagggtgttgaaatcggtgataaacacgtagaagtaatggttcgccagatgcttcgcaaagtacgcgtgattgatgccggtgacactgatgtgcttccaggtacattgcttgatattcaccaatttactgaagcgaacaaaaaggtattgcttgaaggcaaccgaccagctacaggccgtcctgtcttactcggtattacaaaagcatctcttgaaactgattcattcttatctgctgcttccttccaggaaacaacacgtgtccttacagatgcagcgatcaaaggtaagcgtgacgagcttctcggcttgaaagagaatgttatcatcggtaagcttgttccagcaggtacaggaatgatgaaataccgtaaagtaaaaccagtatcaaatgttcagccgactgacgatatggtcccggttgaataactgatttaactctgctgaaagactgcaaaaacagtctttcagcagatatatttatgaaaaagtcactctatgagaagaacgaatctaaaaaatgtcataccttgttgacattcgtctcctagaatgataatataaccaaggtgctcgaaataaacctgttactttggaggatatgtttatgtcttatgataaagtatcacaggccaaatcaattattattggtacgaagcaaacagtgaaagctctaaagcgaggttcagtaaaggaagtagtcgttgcaaaagacgcagatccgatactcacgtcaagtgttgtttcacttgctgaagatcaaggtatctctgtctcaatggttgaatccatgaaaaagctcggcaaagcctgcggaattgaggtaggagcagccgctgttgccattattttataacgtacttttgtttttgcgtaagattccatcttgtgtaaagacattgttttttgccttttgatgaaccacctgggtatgtgggttataaaacgtaatgaagggaggaaaaattcatgcctacaattaatcagctaattcgcaaaggacgcgtgagtaaagtagaaaactcaaagtctcctgcacttaacaaaggatacaacagctttaaaaaagagcacactaacgtatcttctccacaaaaacgcggggtatgtactcgtgttggtacaatgacaccgaaaaaaccgaactcagcacttcgtaaatatgctcgtgttcgtttgactaacggaatcgaggttactgcttacattcctggtatcggtcacaacctgcaagagcacagtgttgtacttatccgcggcggacgtgtaaaagacttaccaggggtacgttaccacatcgttcgtggtgcgcttgatactgctggagttgaaaaccgtgcacaaggccgttctaaatacggtacgaaaaaacctaaagcaaaataatatacgaaaatacgcataattgatgaagggaggatattcagatgccacgtaaaggtcctgtagcaaaaagagatgttttacctgatccgatttacaactctaagcttgtatctcgtttaatcaacaaaatgatgatcgatggtaaaaaaggtaagtctcaaacgatcctatacaagtcattcgatatcattaaagaacgtactggcaatgatgcaatggaggttttcgaacaagcattgaaaaacatcatgcctgtacttgaagtaaaagcacgccgtgtaggtggtgcgaactaccaagttcctgtagaagttcgtcctgaacgtcgtacgactcttggacttcgctggttagttaactacgctcgtcttcgtggagaaaaaacgatggaagagcgtttagctaacgaaatccttgacgcagctaacaacactggtgctgctgttaagaaacgtgaagacactcataagatggctgaagcaaacaaagcatttgctcactatcgctggtaggatttatagattaacaaaacacaatttcctaataaggaaggagaaattacccaatggcaagagagttctccttagaaaaaactcgtaatatcggtatcatggctcacatcgatgccggtaaaacgactactacagaacgtatcttgttctatactggtcgtatccacaaaattggtgaaactcatgaaggagcttcacaaatggactggatggagcaggaacaagaacgtggtatcacaatcacttccgctgcgactactgcacagtggaaaggataccgcgtaaacatcatcgatactccaggacacgtagacttcacagttgaagttgaacgttctcttcgtgtacttgatggtgctgttgctgtacttgacgcgcaatcaggcgttgagcctcaaacagaaactgtttggcgtcaggcaacaacttatggagtaccgcgtatcgtttttgttaacaaaatggacaaaatcggtgcagacttcctttactctgtaggaactttaagagaccgtcttcaagcaaacgctcatgcaattcaattgccgatcggtgctgaagataacttcgaaggtatcattgaccttgtagaaaacgttgcgtatttctacgaagatgacctcggaactcgttctgatgcaaaagaaatccctgaagagtacaaagagcaagctgaagagcttcgcaacagccttattgaagctgtatgtgagcttgatgaagagcttatggataagtaccttgagggtgaagaaatcacaattgacgagttaaaagcaggaattcgtaaaggtacattaaatgttgaattctaccctgttcttgttggttctgccttcaaaaacaaaggtgttcaactagtacttgatgctgttcttgactaccttcctgcaccaactgacgttgctgcaatcaaaggtacacgtcctgatacaaatgaagagattgagcgtcattcttctgacgaagagccattctctgcattagcatttaaagttatgactgacccttacgttggtaagttgacgttcttccgtgtgtactctggaacacttgattctggttcatacgtgaaaaactctactaaaggcaaacgtgagcgtgttggacgtattcttcaaatgcacgctaacagccgtgaagaaatctctactgtatacgcaggggatatcgcagctgctgtaggtctaaaagatacaactactggagatactctatgtgatgagaaggatcttgttatccttgagtcaatggaattcccagaaccagttatcgacgttgctattgagcctaaatcaaaagctgaccaagataaaatgggtatcgctttagcgaaacttgctgaagaagatcctacattccgtactcaaacaaacccagaaactggccaaacgatcatctctggtatgggtgaacttcaccttgatatcattgttgaccgtatgaaacgcgaatttaaagtagaagccaatgttggtgctcctcaagttgcgtaccgtgaaacattccgtaccggtgcaaaagttgaaggtaaattcgtacgtcagtctggtggacgcggtcagttcggacacgtttggatcgaattcgaaccaaacgaagaaggcgctggctttgaatttgaaaatgcgattgtcggtggggtcgttcctcgtgaatacatcccagctgttcaagcaggtctggaagatgcactcgaaaatggtgtactagcaggcttcccgcttatcgacattaaagctaaacttttcgacggttcttaccatgatgttgactcaaacgaaatggcatttaaagtcgctgcttctatggcattgaaaaatgcagtcagcaaatgtaacccagttcttcttgaaccaatcatgaaagtggaagtggttattccagaagaatatatgggagatatcatgggtgatatcacttcacgtcgcggacgcgtagaaggtatggaagcacgcggtaacgctcaagttgttcgtgctatggttcctcttgctgaaatgttcggttacgctactgcacttcgttctaatacgcaaggtcgcggtacgttcactatgcacatggatcactacgaagaagtgccgaagagcgtcgcagaagaaattatcaaaaaaaataaaggcgaataattgattttgccgcttaactcaagtataactactattgtaagatgaggaagtgaaagctttctttcacttcctatcactctatacattactaattaaaagctcttaaggaggattttagaatggctaaagaaaaattcgaccgttccaaatcacatgccaatattggtacaattggacacgttgaccatggtaaaacaactttaactgctgctatcacaacagtacttcataagaaatctggtaaaggtacagctatggcgtacgatcaaattgatggtgctccagaagaacgcgagcgcggtatcacaatctctactgcacacgttgagtacgaaactgaaactcgtcactatgcacacgttgactgcccaggacacgctgactatgttaaaaacatgatcactggtgctgcgcaaatggacggagctatccttgtagtatctgctgctgatggcccaatgccacaaactcgtgagcacatccttctttctaaaaacgttggtgtaccatacatcgttgtattcttaaacaaatgcgacatggtagacgacgaagagcttcttgaactagttgaaatggaagttcgcgatcttcttagcgaatacgacttccctggtgatgatgtaccagttgttaaaggttctgctcttaaagctcttgaaggagacgctgagtgggaagctaaaatcttcgaacttatggatgcggttgatgagtacatcccaactccagaacgcgacactgaaaaaccattcatgatgccagttgaggacgtattctcaatcactggtcgtggtacagttgctactggccgtgtagaacgcggacaagttaaagtcggtgacgaagttgaaatcatcggtcttcaagaagagaacaagaaaacaactgttacaggtgttgaaatgttccgtaagcttcttgattacgctgaagctggtgacaacattggtgcccttcttcgcggtgtatctcgtgaagaaatccaacgtggtcaagtacttgctaaaccaggtacaatcactccacacagcaaattcaaagctgaagtttacgttctttctaaagaagagggtggacgtcatactccattcttctctaactaccgtcctcagttctacttccgtacaactgacgtaactggtatcatccatcttccagaaggcgtagaaatggttatgcctggagataacactgaaatgaacgttgaacttatttctacaatcgctatcgaagaaggaactcgtttctctattcgtgaaggcggacgtactgttggttcaggcgttgtttctacaatcactgagtaatagtatggttttaaacgagacccctgtgggtctcgttttttgtttgcttatctttttcttgtataataggatctatcatattcgaggggttaatatttatgattcctgaaaagaaatcaatcgcaatcatgaaagaactaagcattggaaatacaaagcaaatgctgatgattaatggagttgacgtgaaaaatccattgctgctttttttacatggcgggccgggaacgccgcaaatcggatatgttagacattatcaaaaagagctggaacagtattttacagtagttcattgggatcagagaggatcggggctttcttattctaagcgaatttcgcatcactctatgacaataaatcacttcattaaagatacaatccaagtcactcaatggcttttagctcatttttcaaaatcaaaactttacctagccggtcattcttggggatcaatactggcgcttcatgtgctgcagcagcgtcctgatttattttacacgtattatggaatcagccaggttgttaacccgcaagatgaagaatcaactgcttatcaacatattcgtgaaatttccgaatcaaaaaaagccagcatattatctttccttacacgtttcattggtgctccgccttggaagcaggatatccagcaccttatctatcggttttgtgttgagctaaccaggggaggattcactcaccgtcatcgtcaatctctcgctgtattatttcaaatgcttactggcaatgagtatggagtgcggaacatgcacagcttccttaatggattgcgcttcagtaaaaaacatttaactgatgagttgtaccggtttaatgcttttacatcagttccttctattaaagtaccgtgtgttttcatttcagggaaacatgacttaattgttcctgcagaaatatcgaaacagtattatcaagaacttgaggcacctgaaaagcgctggtttcaatttgagaattcagctcacaccccgcatattgaggagccatcattattcgcgaacacattaagtcggcatgcacgacaccatttatgatagatccttgataaataagaaaaacccctgtataataaaaaaagtgtgcaaatcatgcatattttaaataagtcttgcaacatgcgcctattttctgtataatggtgtatgttggtctttgactgcgatgaagtgagaggttgctgacacacccggccgctttgccatggcaaggtgttcaggtttttctcacggagaactgtctaacgtgatgtaggcgaaaaggagggaaaataatggcaaaacaaaaaattcgtattcgtttgaaagcatatgatcatagaatccttgatcaatctgcagagaagattgttgaaacggcaaaacgttctggtgccagcgtatctggtccgattccgttgccaactgaaaaatcagtttacacaatccttcgtgcggtgcacaaatacaaagattctcgtgagcaatttgaaatgcgtacacataaacgtttaatcgacattgtgaacccaacaccacaaactgttgatgctcttatgcgattagacttaccatctggtgtcgatatcgaaattaaactttaattctaaaatatagaatgatcttaataggaggtgtgacgaatgaccaaaggaatcttaggaagaaaaattggtatgacgcaagtattcgctgagaatggtgatcttattccggtaactgttatcgaggctgctccaaacgttgttcttcaaaagaaaacagctgaaaacgacggttacgaagcaatccagcttggttttgacgacaagcgtgaaaagctttctaacaaacctgaaaaagggcacgttgcaaaagcggaaactgctcctaagcgcttcgttaaagaattacgcggagtggaaatggatgcgtatgaagttggtcaggaagtcaaggttgaaattttctctgctggagaaatcgtagatgtaacaggagtatctaaaggtaaaggtttccaaggtgcgatcaagcgccacggacaatctcgcggacctatgtctcacggttcacgctaccaccgtcgtcctggttcaatgggacctgtagatcctaaccgtgtattcaaaggtaaattattacctggacgtatgggcggagagcaaatcactgttcaaaaccttgaaatcgtaaaagttgatgcagaacgcaatcttcttttgatcaaaggtaacgtacctggtgcgaagaaatctttaatcactgttaaaagtgctgttaaatctaaataattctcttaggaaaggaggaaattgattatgccaaaagtagcattatacaaccaaaacggttctactgctggtgacatcgaattaaacgcttctgtatttggtatcgaaccaaatgagagtgttgtattcgacgctattcttatgcaaagagcttccttacgtcaaggaactcacaaagtaaaaaatcgttctgaagtacgcggcggaggtcgtaaaccatggcgtcaaaaaggtactggacgtgcccgtcaaggttcaatccgttcaccgcaatggcgcggaggtggtgtcgtattcggcccaacaccacgcagctattcttataaattacctaaaaaagttcgccgcttggcaatcaaatcagtattgtcttctaaagtgatcgacaacaacatcatcgttcttgaagatcttactcttgatacggctaaaacaaaagaaatggcagctatccttaaaggattatctgttgagaaaaaagctttaatcgtaactgcggatgcaaacgaagcagtagcattatctgctcgtaacattcctggagttactgttgttgaagctaacggaatcaacgttttagacgttgtcaaccacgagaagcttctgattacaaaagcagcggttgaaaaagtagaggaggtgcttgcataatgaaagatcctcgtgatgttctaaagcgccccgtcattactgaacgttctgccgatttaatgactgaaaaaaaatatacttttgaagttgatgtaagagctaacaaaacagaagtgaaagacgcggttgaaagcatctttggagtgaaagttgacaaagtcaacatcatgaactacaaaggcaaatcaaaacgtgttggacgctacactggtatgactagccgtcgcagaaaagcgatcgtaaaacttactgcagacagcaaagaaatcgaaatttttgaagcttaattatctgtaaaaagaaggagggaaattcaaaatggcgattaaaaagtataaaccgacctctaatggacgtcgtggcatgacaacttcagattttgctgaaatcacgactgacaagccggaaaaatccttgcttgctccccttcacaaaaaaggcggacgtaacaaccaaggtaaattgactgtacgtcaccaaggtggcggacataaacgccaataccgtgttatcgacttcaaacgcgataaagatggtatacctggacgcgttgctacagttgaatacgatccaaaccgttcagctaacatcgctctaatcaactatgcagacggagaaaaacgttacattcttgctcctaaaggaattcaagtaggtactgaaatcatgtcaggtcctgaagctgacattaaagtaggtaatgcacttccacttatcaacatccctgttggtacagttgtgcataacattgaattaaaacctggtaaaggcggacagcttgtacgttcagctggtacatctgctcaggttcttggtaaagaaggtaaatacgttcttgtacgtcttaactctggtgaagttcgcatgatcctttctgcttgccgtgcttctatcggtcaagtaggtaacgaacagcacgaacttatcaacattggtaaagctggacgttctcgctggaaaggcatccgtcctacagttcgtggttctgtaatgaaccctaacgatcacccacacggtggtggtgaaggacgtgcgccaatcggacgtaaatcaccaatgtctccatggggcaaaccaactcttggattcaagactcgtaagaaaaagaacaaatccgataaatttatcgtacgtcgtcgtaaaaataaataacggggttgtctacggttcttttcggaccgtagtgcaatcacgaagggaggttccaaaatggctcgcagcttaaaaaaaggaccatttgtcgatggacacttgatgactaaaatcgagaaattaaatgaaacagacaagaaacaagtcgtaaaaacttggtctcgtcgttctactattttcccacagtttattggtcacacaatcgcagtctatgacggacgtaaacacgtgcctgtattcatctctgaagatatggtagggcacaagttgggtgaattcgctccaactcgtacgtacaaaggtcatgctagtgatgacaaaaaaacaagacgctaagagaggaggcttttaaatgcaagctaaagctgttgcaagaacagtccgtattgctcctcgtaaagcacgtctagtaatggacctgattcgaggcaagcaagtaggtgaggcagtatcaatcttgaaccttacaccaagagctgcttctccaattatcgagaaagtattaaaatccgctattgcaaatgctgagcataactatgaaatggacgctaacaacctggttatttctcaagcattcgttgacgaaggccctacgttaaaaagattccgcccacgtgctatgggacgtgcgagccaaatcaacaaacgtacgagccacattacaatcgttgtatcagaaaagaaggagggataagtagtgggtcaaaaggtaaatccagtcggtcttcgtatcggagtcattcgtgattgggaatctaagtggtacgctggtaaagattacgctgacttcctgcacgaagatttaaaaattcgtgaatacattagcaaacgcctttctgacgcttctgtttctaaagtagaaattgagcgtgcagcaaaccgcgttaacattacgatccacacagctaagcctggtatggttatcggtaaaggcggttctgaagtcgaagcacttcgcaaagcccttaacagccttactggcaagcgtgtacacattaacattcttgaaatcaaaagagcagatcttgatgcacagctagttgctgacaacatcgctcgtcaattagaaaaccgtgtttctttccgccgtgcgcagaaacaacaaatccaacgtactatgcgtgctggagcacaaggtgtgaaaacaatggtttctggtcgtcttggcggtgcagatatcgctcgttctgaatactacagtgaaggaactgttccattgcacacattacgtgcggacattgactatgcaacatctgaagctgatactacttacggtaagcttggtgtaaaagtctggatctatcgtggagaggttcttcctactaagaagaaaaatgaggaaggaggaaaataatatgttattaccaaaacgcgttaaatatcgcagagagcatcgcggaaaaatgcgtggccgtgcgaaaggcggtactgaagtacatttcggagaattcggtatccaagctctagaagcttcttggattactaaccgtcaaatcgaagctgcacgtattgcgatgactcgttacatgaaacgtggcggtaaagtttggatcaaaattttcccttctaaaccttacactgctaaaccacttgaggtacgtatgggatccggtaaaggggctccagaaggttgggtagctgttgtaaaaccgggcaaagttttatttgaaatttctggtgtgtctgaagaggttgctcgtgaagcgcttcgccttgcatctcacaaattgccaattaaaacgaagttcgtaaaacgtgaagaaattggtggtgaatcaaatgaaagctaatgaaattcgtgaccttaccactgctgaaattgaacaaaaagtaaagtctcttaaagaagaacttttcaatcttcgctttcaattagcgacaggacaacttgaaaatactgctcgcattcgtgaagtgcgcaaagctatcgcgcgcatgaaaactgtgattcgtgaaagagaaattgctgctaataaataatcactgaggggaggtcgtgagcatgagcgaacgtaaccaacgcaaagtttaccaaggccgtgttgtttctgacaaaatggataaaaccattactgttgttgttgagacatacaaaaaacatacactttacggtaaacgcgtaaaatactcaaaaaaattcaaagcacatgatgaaaataatcaagctaaaatcggtgacatcgttaagatcatggaaactcgtccattgtctgcaactaagcgtttccgtctagttgaagttgtcgaagaagctgttattatctaataaagttcggaattctttttccgaagggaggtaacaaataatgattcaacaagagactcgtttaaaagtagctgacaactctggcgcacgtgaagtacttactattaaagttcttggtggttctggacgtaaaacagctaacattggtgatgtaattgtttgcacggttaaacaagcaacaccaggaggcgttgtcaaaaaaggtgaagtcgtaaaagctgttatcgttcgcactaaaagcggagcgcgcagaagtgacggttcatacatcagcttcgatgagaatgcatgtgttatcatccgtgacgacaagagcccacgcggaactcgtatcttcggaccagttgctcgtgaattgcgtgaaaacaactttatgaaaattgtttctctagctccagaagttatctaattgaaataaatgccttactcaaggaggtgcgatcaggatgcatgtaaaaaaaggcgataaagttatggttatctctggtaaagataaaggcaaacaaggaacaatccttgctgctttccctaaaaaggaccgcgttttagttgaaggtgttaacatggtaaagaaacactctaaaccaactcaagctaaccctcaaggcggtatttctaatcaagaggcgccaattcatgtatcaaacgttatgccgctcgatcctaaaacaggtgaagtgactcgcgtaggatacaaagtggaagatggcaaaaaagttcgtgtagcaaaaaaatctgggcaagttctagataaatagtattaaaaggaagggaggtctatctcatgaaccgccttaaagaaaagtacaataaagaaattgcacctgctttaatgactaagttcaactatgattcagtcatgcaagtgcctaaaatcgaaaaaatcgtaatcaacatgggtgttggtgacgctgttcaaaacgccaaagcaatcgacagtgctgttgaggaattaacgtttatcgcaggtcaaaaacctgtcgttactcgtgcgaagaaatcaattgctggattccgtcttcgtgagggaatgcctatcggtgcgaaagtaactcttcgcggagagcgcatgtatgatttccttgataaacttatttctgtatctttaccgcgtgtacgtgacttccgcggggtttctaaaaaatctttcgacggtcgcggtaactacacacttggtatcaaagaacagttaatcttccctgaaattgactacgataaagtaacaaaggttcgcggaatggacatcgttatcgtaacaactgctaatactgacgaagaagctcgtgagctattaactcaagtaggtatgccgttccagaaataatcaatgaaagggaggcgaaatcgtggctaaaaagtctatgattgcgaaacaacaacgtacaccaaagtttaaagtacaagagtacacacgctgtgaacgctgcggacgtccgcattcagtcattcgtaaatttaaactttgccgtatttgtttccgtgagcttgcatataaaggacaaattcctggcgtgaaaaaagccagctggtaatccccaagaaagggaaggaggtaattatataatggttatgacagatccaattgcagatatgctaactcgtattcgcaatgcaaacatggtacgtcatgagaagcttgaaattcctgcttctaaattgaaaagagaaattgctgaaattttaaagcgtgaaggtttcattcgtgacgttgagttcgtagaagacagcaaacaaggtattatccgcgttttcttgaaatacggacaaaacaacgagcgcgttatcactggtcttaaaagaatcagcaagcctggtttgcgtgtttatgctaaatctaatgaagtaccccgcgtacttaacggtcttggaatcgcgattatttctacatcacaaggtgttttaacggacaaagaagcccgtgcaaaacaagctggtggagaagttctagcatacgtttggtaagaagtttaacatgaatggaggtgtttggtatgtctcgtgtaggtaagaagctacttgagattccttctgatgttacagtaacgttaaatgataacaacactgtagctgtgaaaggaccaaaaggagaattaactcgtacgtttcaccctgatatggagattaaagtagaggacaatgtgcttacagtcgctcgtccttctgatcaaaaagagcaccgtgccctgcatggtacgactcgcagtctgcttggcaacatggttgaaggtgtatctaaaggatttgaaagaggtttggaattagtcggtgtcggttaccgtgcttctaaatccggaaataaacttgttttaaacgttggatactctcatcctgttgagatcgttcctgaagaaggcatcgaaatcgaagttccttctcaaacaaaagtagttgtaaaaggtacagacaaagaacgcgtaggagctattgctgctaacatccgcgctgtacgttctccagagccttacaaaggtaaaggaatccgctacgaaggtgaagttgttcgccgtaaagaaggtaaatctgctaagtaagatcgcttaaagtgaagaaaggagtgacctagatgattacgaaaactagcaaaaatgctgctcgtcttaaaagacacgctcgtgttcgcgctaaactttccggtactgctgaaagaccgcgcctgaacgttttccgttctaacaagcacatttacgctcaaatcatcgatgatgtaaatggtgtaacacttgctagtgcatctactctcgataaagacttgaacgttgaaagcactggagatacttctgctgctactaaagttggagaattagttgcaaaacgcgctgctgaaaaaggcatttctgacgtagtatttgaccgtggcggatacttataccatggacgtgtaaaagctttggctgatgccgctcgtgaagctggacttaaattttaataaaagaaggagggacacatgattatgcgtcgtattgacccaagcaaattagagttagaagaacgcttagttacggttaaccgcgtagcgaaagttgttaaaggtggtcgtcgtttccgcttcgcagctctagtcgttgtcggtgacaaaaacggacacgtaggattcggtactggtaaagcacaagaagtaccagaagcgattcgcaaagctgttgaagatgcgaaaaagaatttgattgaagtaccaatggttggaactacaattccacacgaaatcatcggacgtttcggtgcaggtaacatcttgttaaaacctgcttctgaaggtactggagttatcgctggaggccctgtacgtgcggtacttgagctagctggtgtagctgatatcctttctaagtctttaggttctaacacaccgatcaacatgattcgtgcaacacttcaaggtttaagtgaacttaaacgtgctgaagacgttgcgaagcttcgtggaaaatctgtagaagaactgttaggataaggagggaacattaatggctaaattagaaattaccctcaaacgaagtgtaatcggtcgcccggaagaccaacgcgttactgtaagaacacttggtttaaagaaaacaaaccaaactgttgttcatgaagacaacgctgcgatccgtggtatgattaataaagtatctcatttagtttctgttaaagaacaataaaaatatttgatcggataaggaggtgtcctaatgaaacttcatgaattaaaaccttcagaaggttcacgcaaaacgcgtaatcgcgtaggtcgtggtattggttctggcaacggtaaaacagctggtaaaggtcacaaaggtcaaaacgctcgttctggcggcggtgtacgccctggattcgaggggggacaaatgcctttattccaacgtcttcctaaacgtggtttcactaacatcaaccgcaaggaatacgctgtagtcaacctagacaaattgaacggttttgcagaaggaacggaagtcactcctgaacttcttctagagactggtgttattagcaaacttaatgcaggagtaaagattcttggcaacggtaaattagagaaaaaattaactgtaaaagccaataaattctctgcttctgcgaaagaagctgttgaagctgctggcggtacagctgaggtgatctaacttgtttaaaacaatctccaactttatgcgtgtgagtgatatcaggaataaaatcatattcactttactcatgcttatcgtctttcgcataggtgcgtttattcctgtgccttacgttaacgctgaagcgttacaggcacagtctcaaatgggtgtttttgatctccttaatacatttggcggcggtgcgctttaccaattttccattttcgcaatgggaattactccttatatcacggcttcgatcatcattcagctgcttcagatggatgtggtaccgaagtttaccgagtggtctaagcaaggtgaagttggccgccgtaaattagctcagttcacaaggtactttacgattgtgcttggtttcatccaagcgttaggtatgtcatatggattcaacaatctggcaaacggtatgctgatcgaaaaatccggtgtatcgacatatcttatcattgctttagtgctcactggcggaactgcctttttaatgtggcttggggaacaaattacttctcatggagtaggcaacggaatatcgatcattatcttcgcggggattgtgtctagtattccaaaaacaattgggcaaatatatgagactcaatttgtcggcagcaacgatcagttgtttattcatattgtgaaagtcgcacttcttgtgattgcgattttagcagttattgttggagttattttcattcagcaagccgtacggaaaattgcgattcaatatgctaaaggcacaggtcgttcacctgctggcggaggtcagtctacacaccttccattgaaagtgaatcctgcaggggttattccggtaatctttgcggttgcgtttttgataacgccgcggacgatcgcgtcattctttggaacaaacgatgtgacaaagtggattcaaaacaactttgataatacgcatccggtgggtatggcgatatatgttgcgttgattattgcctttacgtacttttatgcttttgtacaggtaaaccctgaacaaatggctgataaccttaaaaaacagggtggctatatcccgggggttcgtccagggaaaatgactcaagatagaattacgagcattttgtatcgacttacgtttgtgggttctatattcttagccgtgatttccattcttcctatctttttcattcaattcgctggattgcctcaaagtgcacaaattggcggaacatctttgttaattgttgtcggggtagccttggagacaatgaaacaactagaaagccagttggtgaaacgaaactaccgtggatttatgaaaaactagaggaaatggatttatccattccctcttaataaagagaggacgggggaaatccgaatgaacttagtcttaatggggcttcctggtgccggtaaaggcacacagggcgaacgaattgttgaggattatgggattcctcatatctcaacaggagatatgttccgtgctgctatgaaagaagaaacaccactcggactcgaagcaaaatcttatattgataagggagagctcgtacctgacgaagtcacaatcggaattgtaaaagagagacttggcaaagatgattgtgaaagaggttttcttctggacggatttccgcgaacagtcgctcaagccgaagctcttgaagaaattcttgaggaatacggcaagccgattgattatgtcattaacattgaagtcgacaaagatgttctgatggaacgtctgactggacgcagaatttgcagtgtttgcggcacaacctatcatttagtctttaatccgccgaaaacgccgggtatttgtgataaagacggaggcgaactctatcaacgggcagatgataatgaggaaacagtctctaaacggcttgaggtaaacatgaagcaaactcagcctttactcgatttctattcagagaaaggttatcttgcaaacgtgaatggccagcaggacattcaagacgtttatgcagatgtgaaggatcttcttggaggattaaaaaaatgattatctgtaaaaccccacgtgaacttggtatcatgcgggaagcagggcgaatcgtggctttaactcatgaagagttaaaaaagcacattaaaccaggaatctcgacaaaagaattggatcaaattgccgaacgttttattaagaagcagggtgcaatcccatcttttaaggggtataatgggtttcgcgggagcatttgcgtatcagttaatgaagaactcgttcacggcatacctggcagcagggtgctgaaggacggtgacatcatcagtattgatatcggtgctaaattaaatggttatcatggtgactctgcatggacatatccggtaggaaacatcagcgatgatgacaaaaaacttctggaagtgacagaggagtctttatataaaggcttgcaggaagcaaaaccaggtgaacgtttgtcgaatatttcccacgcaatacaaacgtatgtcgaaaatgagcagttttcagttgttagggagtatgtcggacatggtgttggtcaagacttgcatgaggacccgcaaattcctcattacggtccgcccaacaaaggaccacggcttaaacctggcatggttctcgctattgaacctatggtgaacgctggcagccgctacgtgaaaacattggctgataactggacggttgtaacggtagatgggaaaaagtgtgctcattttgaacatacgattgcgattacggaaacgggttttgatatactgacgagagtctagatgatgaaaataattccgaagacagatgtttttcaagcttgatagggcagaaagcttgggtgaacattggcaagaccgaattcatcttgcttcttgtcgttggaattttaaccatcatcaatgtactaacagcagacggagaaaagcgtacatttcattctcctaagaaaaagaatatcaatcatttaaccctttatgattgcgtatctccggaagttcagaacagtataaacgaaacagggcgtgtgacaaacttcttttgaaatttgtcagaaagcaagttactgatttgaagaagggagaacacttgaatggcgaaagacgatgtaattgaagtggaaggtactatagtcgaaacactgccaaacgcgatgttcaaagttgaacttgaaaatggccacactgttttggctcatgtatctggtaaaatccgcatgcacttcattcgcattttacctggagacaaagttacggtagaattatctccatatgacttaactcgtggcaggattacgtaccgttacaaataaagcactccggaaactgaaggaggttggaaacacatgaaagtgagaccatcagttaaaccaatctgcgaaaaatgtaaagttattcgcagaaaaggaaaagtaatggtgatctgtgaaaatccaaagcataaacaaaaacaaggataatttataaggaggtgcccagagaatggctcgtattgctggtgtagatatcccacgtgacaaacgtgttgttatttctttaacatacatcttcggaattggccgcacaacggctcagcaagttttaaaagaagctggagtttcagaagatactcgtgtgcgcgatcttactgaagaagaacttggtaaaatccgtgatattattgacaaactgaaagtagaaggtgaccttcgccgtgaagtttctcttaatatcaaacgtctgatcgaaatcggaagctaccgcggaatccgtcatcgcagaggattacctgttcgcggacaaaactctaaaaacaacgcgcgtactcgtaaaggtccgcgtcgtactgtagctaacaagaaaaaataagtaagggaggttcttaaacaatggctgctgctcgtaaatctaacacgcgtaaacgtcgcgtgaaaaagaatattgagtctggaattgctcatattcgttcaactttcaataacacgatcgttacgatcactgacactcatggtaatgctatttcttggtctagtgccggagctttaggattcagaggttctcgtaaatctactccttttgctgcgcaaatggctgcagaaacagctgctaaaggttcaatcgaacatggtcttaaaactctagaggttactgttaaaggacctggttcaggccgtgaagctgcaatccgtgcacttcaagctgctggactagaagtcactgctatcagagacgtaactcctgttcctcataacggatgccgtccaccaaaacgtcgccgcgtgtaatttgtttgtatagattttgtgtccctgtcaataatgggttatgatacagttatttatgaaacgaatgcaccgactcgttgcctgagcacatacgggactaaacaatggggaatttcggatggaatctcatatgattctattcgaggtttcgacgttttgaaggagggttttaagtaatgatcgagattgaaaaaccaaaaatcgaaacggttgaaatcagcgacgatgccaaatttggtaagtttgtcgtagagccacttgagcgtggatatggtacaactctgggtaactccttacgtcgtatcctcttatcctcactccctggtgccgctgtaacatcaatccagatagatggtgtactgcacgaattctcgacaattgaaggcgttgtggaagatgttacaacgattatcttacacattaaaaagcttgcattgaaaatctactctgatgaagagaagacgctagaaattgatgtacagggtgaaggaactgtaacggcagctgatattacacacgatagtgatgtagagatcttaaatcctgatcttcatatcgcgactcttggtgagaatgcgagtttccgagttcgccttactgctcaaagaggacgtgggtatacgcctgctgacgcaaacaagagagacgatcagccaatcggcgtgattccgatcgattctatctatacgccagtttctcgtgtatcttatcaggtagagaacactcgtgtaggccaagttgcaaactatgataaacttacacttgatgtttggactgatggaagcactggaccgaaagaagcaattgcgcttggttcaaagattttaactgaacaccttaatatattcgttggtttaactgacgaagctcaacatgctgaaatcatggttgaaaaagaagaagatcaaaaagagaaagttcttgaaatgacaattgaagaattggatctttctgttcgttcttacaactgcttaaagcgtgcgggtattaacacggttcaagagcttgcgaacaagacggaagaagatatgatgaaagttcgaaatctaggacgcaaatcacttgaagaagtgaaagcgaaactagaagaacttggactcggacttcgcaaagacgattgactagtttcccttgtgaactaggattttcgtgtgtttattattcagaaacagcattccaataaaggaggggacatcacatgtcatacagaaaactaggacgtacgagtgcacagcgtaaagctatgcttcgtgatcttacaactgatttgatcatcaacgaaagaatcgaaacaactgaaacacgtgcgaaagaacttcgctctgtagttgaaaaaatgatcacgcttggcaaacgcggtgatcttcacgctcgccgtcaagctgctgcatacatccgcaacgaggttgcaaacgaagaaaataatcaagatgcacttcaaaaattattctctgacattgcaactcgttacgaggagcgccaaggtggatacacacgtattatgaagcttggtcctcgccgtggtgacggagcaccaatggcaattatcgaattggtttaatcacatatttttgtgtatctaaagaagggcgggacagtttctaactggatctatgccctttttttagatactgcaacttttaatagagagaaaagcagagcattagctgagaggaggccggttttccatgaatcaaaatcagttgatatcggtagaggatatcgtatttcgatatcggaaggacgcagaaagacgagcactagacggcgtctccctgcaggtgtatgagggtgaatggcttgcaatcgtaggtcataacggttcagggaaatcaacactggcccgggcattgaatggtttaattcttcctgaatcaggcgacattgaggttgccgggattcaattgacagaggaatctgtttgggaagtgcgtaagaagataggtatggtctttcaaaatccggataaccaatttgtcggaacgactgttcgcgatgatgtggcttttggtttagaaaacaatggtgtaccgcgggaagaaatgattgagagagtagactgggcagtaaaacaggtgaatatgcaagattttctcgatcaagagccgcaccatctctccggaggccaaaagcagagagttgcgattgcgggggttattgccgcacgtcctgatattattatcttagatgaagcaacatccatgcttgatccgatcgggcgagaagaagtgcttgaaacggtaagacatttaaaagagcagggcatggcgactgtcatatccattacacatgacctgaatgaggcagcaaaagcagacaggatcattgtcatgaatggcggtaaaaaatatgctgaagggccgcctgaagagatttttaaattgaataaagaacttgttcgaattgggcttgatttacccttctcattccagcttagccagcttttaagagaaaatggactggctttggaagaaaaccatttgactcaggaagggctggtgaaagagctgtggacattacaatcaaagatgtagagcatcgctatcagatgaagaccccgtttgagcgcctagcactgtatgatatcaatgcatcgattaaagaaggaagctacgtagccgttatcgggcatacaggctctggcaagtccactcttctacagcacctaaatggtctcctgaagccgacgaagggacagatatcactaggcagcactgtcattcaggcagggaaaaagaataaagatctgaaaaaacttcgtaaaaaagtcggaatcgttttccaatttcctgagcatcaattattcgaagaaacagttcttaaagatatttcattcggaccgatgaactttggtgttaaaaaagaagatgctgaacaaaaagcgagagagatgctgcagcttgtaggtttatcagaagagcttttggacaggtcaccctttgaattaagcgggggacaaatgcgcagagttgcaattgccggcgtacttgcaatggaccctgaagtgcttgttctggatgaaccgactgcaggattggacccaagagggcgaaaagagattatggacatgttttatgagcttcatcaacgtgggaacttgacgacgatccttgtgacacacagcatggaggatgcagctgcatacgctgatgaaatgattgttatgcataaaggaacgatacaagcatcaggcagtccgcgtgatctgtttttaaagggtgaagagatggccggctgggggctggatcttcctgaaacaataaaattccaaagacaccttgaagctgcactgggtgtgagatttaatgagcctatgctcacaatcgaagatgccgctgccgaaatccgtgctctttttcagggagagaagactttatgatggacagcatgattatcggcaagtatgtaccggggacttcacttgtgcaccggcttgaccccagaacaaaactgatcacgatctttttatttgtctgcattgtattcttagccaataatgttcagacatatgcgttgcttggtttatttacaattggcgtcgtttctttaacaagagttcctttctcttttttaatgaaagggctgaagccaatcatctggattgtcctttttacgttccttcttcacattcttatgacacatgaaggaccgattatctttcaaataggttttttcaaagtctatgagggcggtctggttcaggggatattcatttctcttagattcgtctatttgattttaatcacaaccttattaacgcttacgactacaccgattgagattaccgatggaatggagcagctgctgaacccattgaaaaaattaaagcttcctgttcatgagctggctcttatgatgtcaatttctttacggtttattccgacactgatggaggagacagataagatcatgaaggctcagatggcgcgaggcgttgattttacaagcgggcctgtcaaagaaagagtgaaggctattgtcccgcttcttgtcccgctcttcgtcagcgcatttaaacgcgccgaagagcttgcggtggcaatggaagcaagaggctatcaaggcggagaaggacgtacgaaatatagaaagcttgtatggacaggaaaagacacttctgtcattgtcagcttaattgtattagctgctttgttatttttcttaagggcttagaggtgctgtatgagactgaaatgcacgatttcttatgacggacatttgtttaacggttatcaggttcagccgggcaaaagaacggttcaggatgaactggagaaggctttggctgtcctgcataagtcaaaagacagaattccggtcgtttcgtctggaagaacagacagcggggttcacgcagccggacaggtgattcattttgacactccgctgtctatcccggctgagagatggccatatgccttaaatgcactgcttccggacgatatcgcagtcaaacaggcagaaattgcggatgatgggttccatgcacgatttagcgcagtcaaaaaagaatatcgctactttgtatacacggagaaacacccggacgtatttaaacggcattacgcttaccatttttcatatcgccttaatgtgcaggacatgagagaagcggcaaagcatcttatagggacacatgattttacgagcttttgcgcggctaaaacagaagtgcaggacaaggtaagaacgatatacgaacttgattggactgagacggctgacggcctgcaaatgcggatcacaggcagcggtttcttatataatatggtcagaattattgcgggtactttgcttgatgcaggtattggaaaaatttctcccgatgaggtgaaatccatgctggaagcgaaggatcgcgaagcggcagggcgcacagcgccggggcacgggctatatttatggaacgtttactatgacaactaaaccaggtgtataatattttcttgacagagtctgcataaagttataagatatcatatggtatgtatttcaaccccacgataagccccggaacttattgtgttgtgaaatagaacgtaatcgaagtttattgaaaatgacagatcatttaggagggaaattcaatgcgtacaacacctatggctaacgcaagtactattgaacgcaagtggttagttgttgatgctgctggcaagactttaggtcgtctttcttcagaagttgcagctatccttcgcggaaaacacaaaccaacttacacaccacacgttgatactggagatcatgtgatcatcatcaacgctgaaaaaatcgagttaactggtaaaaagttaactgacaaaatctactaccgtcacactcaacatccaggcggattaaaatcaagaactgctcttgaaatgcgtacaaactaccctgagaaaatgcttgagcttgctatcaaaggcatgcttccaaaaggttctctaggtcgtcaaatgttcaaaaaattgaacgtataccgtggttctgagcatccacacgaagcacaaaaacctgaagtttacgaacttcgcggttaattaaaaaggaggttaccaatttggcacaggttcaatattacggtactggccgtcgtaaaagctctgtagcgcgtgtgcgtttagttccaggagaaggccgtatcgtcgttaataatcgtgaaatcagcgaacatatcccatctgcagctttaatcgaagatatcaaacaaccattaactttgactgaaacagctggcacttatgatgttttagtaaacgtacatggaggcggcctatctggtcaagctggagcaatccgtcacggtatcgctcgtgctttgcttgaagcagatccagaataccgtacaactcttaaacgtgcaggtcttctgactcgtgacgctcgtatgaaagaacgtaaaaaatacggtcttaaaggcgctcgtcgtgcacctcagttctcaaaacgttaattttacgttttcaaaaagctctcgaccttgggttgggagcttttttctttcaataaaacgtggcagtcccgcataaaaataacaactgaatggacgcttgacggggttaagcaaattgtttgtttataaacggtctctttgtaataatcatggtagatttcattcttattcaattggaagttcggtcaatgtttattatcgttatgtgatcagcccagctccatctaaccactgtatctcatccgttaaagttcactgctgattcttaacccggagaaacaatagctctcattgctaatggctttatgtaacgaagtaaaagtaaatctgatgatataaatcacatatctcctttgtgatttttttgcgtttttatgaacttttttctaaatatgcaaagggaaagcgatatcaatctagaaatatttgttatactctatacattaaagtaaggagaagattcatgaatgcgttagtagctcataatagcaaagcctgggataaaaaagtagaaacaggcaatgaatggactgttgctgttgaacagcaggttatcgaacaagcaaaaaaaggcaattgggatataagggtaacaccaatgaaagatgtaccgaaggattggtttccgcctatcaaaggtctgaaagtactctgtttagcatcaggcggcggccagcagggtccagttttggcagccgcaggcgcggatgtcactgtattagataactcagaaaaacagctgaatcaggatagaatgattgctgagcgagatggtctgacgatacacactgtcaaaggaagcatggacgatttaagtgtatttaatgatgaatcatttgatgtcattgtacatcctgttgccaatgtttttgttgagaatgtcctcccggtatggaaggaagcgtaccgtgtgttgaaaaggaacggcattctaatctcgggttttgtcaatcctgttgtatttctgtttgatacagaattagaacagcaaggtgttttaaaagtaaaacactctattccatacgctgacccagaagatcttccgaaacataaagtgaaaaaactgatcgaaaataatgaggctctggaattcggccattccttagaagaccaaatcaaaggccaaattgatgccggttttatcgttactggtttttatgaagataaaggcggttttgtattagaccaatatatccatacatattctgcaacaagaagcgtgaaagtatgaaaagcagcgacctgttagaggggctgcttttttcataaccaattacagaacatttgttcctcaccctgcagaaagctgattttttatcaatgttacaccttcatttgggcgaatttccaaccgaattcgggcattgtttcatcatccaaacctcaaaataatcggtaaaaggagagtgaatttatatggcagaagtactgtcttttatggatgtgaaacgccaaaaggattttgaattagaa
